United States Patent Application Publication US 2011/0111458 A1 - sequence listing, part 2

SEQ ID NO: 1 - DNA, 4646332 bp, Escherichia coli W3110 (residues 1,548,779-3,097,556 of 4,646,332)
gccgaccgggccgagcccctcactgacaccgcgaatcaatcctaccatcgtgctccacaggacgatcgctatcagccctatgagcgttgctttttgtcgtgtcatgctcgctgttttgtctctcttgccgttaaaaattaagctgaattttatagcatttttttaactggcctgtcaggcagtggtgcgtttttctaccgctattgaggtaggtcaatttgcgaaggcggattattttgtggcaaacagatgttctttttgatttcgcgcaaaaagattcagaattttactgttagtttcctcgcgcagtaatacccctgaaaaaagaggaaagcaatggacgtcagtcgcagacaattttttaaaatctgcgcgggcggtatggctggaacaacagtagcggcattgggctttgccccgaagcaagcactggctcaggcgcgaaactacaaattattacgcgctaaagagatccgtaacacctgcacatactgttccgtaggttgcgggctattgatgtatagcctgggtgatggcgcaaaaaacgccagagaagcgatttatcacattgaaggtgacccggatcatccggtaagccgtggtgcgctgtgcccgaaaggggccggtttgctggattacgtcaacagtgaaaaccgtctgcgctacccggaatatcgtgcgccaggttctgacaaatggcagcgcattagctgggaagaagcattctcccgtattgcgaagctgatgaaagctgaccgtgacgctaactttattgaaaagaacgagcagggcgtaacggtaaaccgttggctttctaccggtatgctgtgtgcctccggtgccagcaacgaaaccgggatgctgacccagaaatttgcccgctccctcgggatgctggcggtagacaaccaggcgcgcgtctgacacggaccaacggtagcaagtcttgctccaacatttggtcgcggtgcgatgaccaaccactgggtggatatcaaaaacgctaacgtcgtgatggtgatgggcggtaacgctgctgaagcgcatcccgtcggtttccgctgggcgatggaagcgaaaaacaacaacgacgcaaccttgatcgttgtcgatccccgttttacgcgtaccgcttctgtggcggatatttacgcgcctattcgttccggtacggacattacgttcctgtctggcgttttgcgctacctgatcgaaaacaacaaaatcaacgccgaatacgttaagcattacaccaacgccagcctgctggtgcgtgatgattttgctttcgaagacggtctgttcagcggctacgacgctgaaaaacgtcaatacgataaatcgtcctggaactatcagctcgatgaaaacggctatgcgaaacgcgatgaaacactgactcatccgcgctgtgtgtggaacctgctgaaagagcacgtttcccgctacacgccggacgtcgttgaaaacatctgcggtacgccaaaagccgacttcctgaaagtgtgtgaagtgctggcctccaccagcgcaccggatcgcacaaccaccttcctgtacgcgctgggctggacgcagcacactgtgggtgcgcagaacatccgtactatggcgatgatccagttgctgctcggtaacatgggtatggccggtggcggcgtgaacgcattgcgtggtcactccaacattcagggcttgactgacttaggcctgctctctaccagcctgccaggttatctgacgctgccgtcagaaaaacaggttgatttgcagtcgtatctggaagcgaacacgccgaaagcgacgctggctgatcaggtgaactactggagcaactatccgaagttcttcgttagcctgatgaaatctttctatggcgatgccgcgcagaaagagaacaactggggctatgactggctgccgaagtgggaccagacctacgacgtcatcaagtatttcaacatgatggatgaaggcaaagtcaccggttatttctgccagggctttaacccggttgcgtccttcccggacaaaaacaaagtggtgagctgcctgagcaagctgaagtacatggtggttatcgatccgctggtgactgaaacctctaccttctggcagaaccacggtgagtcgaacgatgtcgatccggcgtctattcagactgaagtattccgtctgccttcgacctgctttgctgaagaagatggttctatcgctaactccggtcgctggttgcagtggcactggaaaggtcaggacgcgccgggcgaagcgcgtaacgacggtgaaattctggcgggtatctaccatcatctgcgcgagctgtaccagtccgaaggtggtaaaggcgtagaaccgctgatgaagatgagctggaactacaagcagccgcacgaaccgcaatctgacgaagtggctaaagagaacaacggctacgcgctggaagatctctatgacgctaatggcgtgcttattgcgaagaaaggtcagttgctgagtagctttgcgcatctgcgtgatgacggtacaaccgcatcttcttgctggatctacaccggtagctggacagagcagggcaaccagatggctaaccgcgataactccgacccgtccggtctggggaatacgctgggatgggcctgggcgtggccgctcaaccgtcgcgtgctgtacaaccgtgcttcggcggatatcaacggtaaaccgtgggatccgaaacggatgctgatccagtggaacggcagcaagtggacgggtaacgatattcctgacttcggcaatgccgcaccgggtacgccaaccgggccgtttatcatgcagccggaagggatgggacgcctgtttgccatcaacaaaatggcggaaggtccgttcccggaacactacgagccgattgaaacgccgctgggcactaacccgctgcatccgaacgtggtgtctaacccggttgttcgtctgtatgaacaagacgcgctgcggatgggtaaaaaagagcagttcccgtatgtgggtacgacctatcgtctgaccgagcacttccacacctggaccaagcacgcattgctcaacgcaattgctcagccggaacagtttgtggaaatcagcgaaacgctggcggcggcgaaaggcattaataatggcgatcgtgtcactgtctccagcaagcgtggctttatccgcgcggtggctgtggtaacgcgtcgtctgaaaccgctgaatgtaaatggtcagcaggttgaaacggtgggtattccaatccactggggctttgagggtgtcgcgcgtaaaggttatatcgctaacactctgacgccgaatgtcggtgatgcaaactcgcaaacgccggaatataaagcgttcttagtcaacatcgagaaggcgtaagggggcgaacagatggctatggaaacgcaggacattatcaaaaggtccgcaactaactccatcacgccgccttctcaggtgcgtgattacaaagcagaagtcgcaaaacttatcgacgtttccacctgtatcggctgtaaagcctgtcaggtggcgtgttcggagtggaacgacatccgtgatgaagtggggcactgcgtcggggtttacgataaccccgccgatctgagcgccaagtcctggacggtgatgcgctttagcgaaaccgaacagaacggcaagctggagtggctgatccgtaaagacggctgtatgcactgtgaagatcccggctgcctgaaggcgtgcccgtctgctggtgcaatcattcagtacgctaacgggattgtcgatttccagtcggaaaactgcatcggctgtggttactgcattgccgggtgtccgtttaatattccgcgcctcaacaaagaggataaccgggtatataaatgcacgctctgcgtcgatcgcgtcagcgtcggccaggaaccggcttgtgtgaaaacctgtccgaccggggctatccacttcggcaccaagaaggagatgctggagctggcggaacagcgcgtggcgaaactgaaagcgcgtggttacgaacatgctggcgtctacaacccggaaggggtcggtggtacgcacgttatgtacgtgctgcatcacgccgatcagccggagctgtatcacggtctgccgaaagatccgaagatcgacacctcggtaagcctgtggaaaggcgcgttgaaaccgctggcagcggctggctttattgccacttttgccgggttgattttccactacatcggtattggcccgaataaggaagtggacgatgacgaggaggatcatcatgagtaagtcgaaaatgattgtgcgcaccaaatttattgatcgcgcctgtcactggaccgtggtgatttgcttcttcctggtggcgctgtccgggatttcgttcttcttcccgacgctgcaatggctgacgcaaaccttcggtacgccgcagatgggacgcattttgcacccgttcttcggcattgcgattttcgtcgcactgatgtttatgtttgtgcgttttgtgcatcacaacatcccggataagaaagatattccgtggctgttgaacattgtcgaagtattgaaaggcaatgagcataaagtggcggatgtcggtaagtacaacgccgggcaaaagatgatgttctggtcgatcatgagcatgattttcgtgctgctggtgaccggggtgattatctggcgtccgtactttgcgcagtacttcccgatgcaggttgttcgctacagcctgctgatccacgcggctgcgggtatcatcctgatccacgccatcctgatccatatgtatatggcattttgggtgaaaggatcgattaaagggatgatcgaagggaaggtaagtcgtcgctgggcgaagaaacaccatccgcgctggtatcgtgaaatcgagaaggcagaagcgaaaaaagagagtgaagaagggatataatctcttttgaactttaagctgaaaatggcgctgtaaaaggcgccattttcatattgtagacaacgtaggctttgttcatgccggatgcggcgtgaacgccttatccggcatgaaaacccttcaaatccaatagattgcagtgaacgtgtaggcctgataagcgtagcgcatcaggcaatgttgcgtttgtcatcagtttcaaatggcgctgtaaaaggcgtcattttcatattgtagacaacgtaggctttgttcatgccggatgcggcgtgaacgccttatccggcatgaaaacccttcaaatccaatagattgcagtgaacgtgtaggcctgataagcgtagcgcatcaggcaatgttgcgtttgtcatcagttctaaatggcgctttataaagtgccatttttttattgcgtaaccagacggcgtaatcgcgacacatccactgttttttctgcctctgccagactccaggcgttttgcagattcagccacatttgcggcgaactgccgatcaccacggaaagtttaatcgccatttctggcgtcaaagctgcttttcctgtcagcaatcggcttgccgttgagggagcaatttccattgctctggcaaactcgcgcaggctgacattaagttcgtccagtgattcctgaataatgtcccccgggcggggatgattggccattttcattagtgtctttactctcagtagcgttccttcactgggaacactatcattattgttccttcctacgcaacaataatccatttagccatttcatgttggagagtgtgcgatgctgcgacccgaacatggcagtcgcagcaaaggcctcttagtgacggaaatcaatcaccatgcggccacggattttgccttcttccatctcagtaaagatggtgttgatgtccgctaacggacgcagggcgactttcggcaccactttaccttcggcggcaaactggaaggcttcagttaaatcctggcgcgtgccgaccagcgaaccgaccacttcaataccatccagcacaagacgtgggatatccaggctcatagactccggcggtagaccgacagccacaacacgaccgcctgcacggacagcatcaactgccgagttaaacgcagctttagctaccgctgttaccaccgcagcgtgagcgccaccagttttctcctgcacaattttggcggcgtcttcggtgtgtgagttaatcgctaaatctgcgcccatttcggttgccagttttaactgctcatcattgacatcaatggcgatcactttggcgttaaagacattcttcgcgtattgcagggcgaggttacccagaccgccaagaccgtagatagcaatccactgccctggacgaatttttgacagcttaacggctttgtaggtggtgactcccgcacaggtaatgctgctggccgccgccgagtccagaccatctggcacttttaccgcgtaatcggcgaccacgatgcactcttccgccatcccgccatcaacgctgtatccggcatttttaactgaacggcagagcgtttcgttaccactgttacagtattcgcaatgaccgcatccttcgtagaaccacgccacgctggcacgatcgcctggttttaatgaggtgacacctggacccacttctgccaccacaccgatgccttcatggcccagaattacgccggttttgtcaccaaaatcgccattcttaacatgaagatcggtatgacatacaccacaacactccattttcagcagggcttcgccatgtttcagtgagcgcagtgttttatacgtaacgtcaacatgatgatccttcgtaacaactgcagccttcatagttcctccttttcggatgatgttctgcatagcaggtgaggcaaatgagatttattcgccactacccagtatggatgagatctgaaaaagggagagggaaatagcccggtagccttcactaccgggcgcaggcttagatggaggtacggcggtagtcgcggtattcggcttgccagaaattatcgtcaatggcctgttgcagggcttcggcagaggttttcaccgccacgccttgctgctgcgccattttgccaaccgcaaacgcaattgcgcgggagactttctgaatatctttcagttccggcagtaccataccttcgccgttcagcaccaatggtgaatactgcgccagcgtttcacttgccgacatcagcatctcatcggtgatacgtgacgcgccggaagcaataacacccaggccgatgcccgggaaaataaaggcgttgttacactgggcgatagggtagattttatctttccataccactggattaaacgggctgcccgtggcgaccagcgcgttaccttcggtccaggcgataatgtcctgcggtgtggcttccacgcgtgacgtcgggttagacagcggcatcacgatcggacgcggacagtgtttatgcatctcacggatgatctcttccgtaaacagcccggtctgtcctgagacgccaatcagaatatctggttttacattgcgcaccacatccagcagtgacagcacatcgctgtcggtatcccagtcactgaggttttcgcgcttctgcaccagtttggtctggaaaggcagcaggttcggcatcttgtcagtcagcaagccaaagcgatcgaccataaagactttctgccgcgccgcttcctcgcttaatccttcgcgctgggtctgggagatgatcatttcggcaatgccgcatcccgctgaacctgcgccaaggaagacgatttttttctcgcttaactgaccacctgccgcgcggcttgctgcgatcagtgtgccgactgttaccgccgcagtgccctgaatgtcatcgttaaaagaacaaatttcattgcgatagcggttaagtaacggcatcgcatttttttgagcaaagtcttcaaactgcaacagcacgtctggccagcgttgtttcacagcctggataaattcatcaacgaattcatagtattcgtcgtcagtgatacgcggattacgccagcccatatacagcggatcgttaagcagctgttggttgttcgttccgacatccagcaccaccggaagggtatacgccgggctgatgccgccacaggcggtatagagcgacagtttaccgatcggaatgcccatcccgccgatgccctggtcaccaagccccagaatgcgttcaccgtcagtcaccacaatcactttaatattatggttcggcacgttttgcagaatatcgtccatattgtgccggttctggtaagagataaacacgccgcgtgaacggcggtagatctcagaaaaacgctcacaggctgcgccgacggttggggtataaataacaggcatcatctcatcaagatgattgtttaccagacggtagaagagggtttcgttagtgtcctggatgttacgcaggtagatgtgtttgtcgatttcggttttgaatccctgatactggatccatgctcgttccgcttgttcttcgatggtttcgaccacttccggcagtaaccccagcaggttgaagttacggcgttcttccatgctgaaggcactgcctttattcaacaacggaaattccagcagtacagggccagcgtaagggatataaagcgaacgctgtttttttgtttttggttccatgtcactcactcttttttgaatatccatccctggggggcttttatcgtctttgctttaccgccagggcgtcggcctcaagtataaagcagataaaaacaaaaacaccattgcgcaggcaatggtgtttaatcgtcattgaggactgatggttatgaattacttttcagcggggcgttttctgccggttgggttatttactacgctggatttgtcaccttcggtaactattttgcgctggttagaaattttatggtccagtccaagaatatgacgtgcctgacggttcgatttcattttaactcctcaatcctgtagctagttttaaggacaacatcgccgtagcgaagaaacacgtgctaaacccctaaattaggttgccgatcaagcatagcaccttaaagcgtagggtgctggccactgaccacataattgatcgtttgctggtagatatcactgaggatgtcgttatcagaagcttcaacccatttggtcagctccatgagaatgtcatcttcagtgacaacaccatgctgtgcccgaaggccttgctcaatggcattaaccagagcgggttctgctgttgaattttctgcctgataataagtaaacatagtgattctccgtgtctgtgtatttatggtgtctgctacggatcgcagatttataaagcacattcagcatggcaaatatttgccgcttcgttgttaagattagtcctggttgatgatttttatattttaacaccatgatattcatagggattgtgattggtatgatccgattaatattgatacaatatcttttgggttatatattcccggtaatctattgtgggaatttaatttaagtgcagaagtaatattttcgccggattttattcggaatatcctgcttatcctcgtgctgtttctcacgtagtctataatttcctttttaagcccacaggagagcaacaatgacaatccataagaaaggtcaggcacactgggaaggcgatatcaaacgcgggaagggaacagtatccaccgagagtggcgtgctgaaccaacagccgtatggatttaacacgcgttttgaaggcgaaaaaggaaccaaccctgaagaactgattggcgcagcgcatgccgcatgtttctcaatggcgctttcattaatgctgggggaagcgggattcacgccaacatcgattgataccaccgccgatgtgtcgctggataaagtggatgccggttttgcgattacgaaaatcgcactgaagagtgaagttgcggtgccgggtattgatgcctctacctttgacggcataatccagaaagcaaaagcaggatgcccggtctctcaggtactgaaagcggaaattacgctggattaccagttgaaatcgtaaagcattgccggatgacgcgtcaggcgcgtgaatgcctgatgcgttgttagcatctctacagcgcccgccagcaccggagctcacgtccgtcctcccttattgctaatgattgccggacttcacatccgtgggttgccagcgggcaacgttcgtagaaaaaacagccttgcggcaacgtgcggtttcccggcagatccgttttacgtaatgcccattcttcctccagcggtttatcaatggcggggagggaatccagcaataatcgggtgtatggatgtgcaggtgccgtcagcacctgctgcgcgtcgcccagttctacaatctgcccgagatacatcaccgccacccgatcgctcatatgacgtatcaccgagacattgtgtgaaatcagcacataggtcagcccgtgattttcctgtagcgttaccagtaaattgaggatctgcgcctgaacggagatatccagcgcagaggttggctcatcaagcacaatcacgtcaggctgcgaagagagtgctctggcaatggcgatacgttgccgctgcccgccggagaacgcatgaggcaggcggtcgagatactccggacgaatacccacctgcacagccaactcctctgccaacgctcgccgctgttgttcactactacgcttagctatccagagcggttctgtgatgatgcgccacaccggtaagcgcggattaagcgaagagagcgggtcctgaaacaccatctgcataatgcgttgtgagccagaacggatgtactgcccgtggctcggttgcagcatacccattaaaagctgtgcgagggtgcttttgccgcagcctgactcgccgacgatccctaaggtttcaccacggcggatctgtaaatcaataccattaatggcatgaacatgttccgtagttttaccaagccagtttttacgggccgggaaattgatatggacgtcgcgtaacgttaataacgtgtcagacacttataacctcctgctgcggataccaacaggcacagcgctggttgttgtcaccacacgctgtcagcgccgggacgttttcacactgtgcacctgccgcatagcaacgatcgcgaaaagcgcagccgtcaggcaaatgggtgaggtttggtaccgtccctggaatggcgggtaatagctggcgtggtactccatgttctggtgcgcattgcagcaaaccaatggtatacggatgccggggatgatggataacgtctgccgtcacgccgctttcaattacgcttccggcatacatcacgtaaacgctatcgcacagttgcgacaccacggccatatcatggctgatgaacagaaccgcagttccactggcgcgggctttatgtttaagcaaacgcagtacctgcaactgcaccgtgacgtccagcgccgtagtcggttcgtcggcaataatcaattgcggctcgcaggagaatgccagcgcaatcattacccgctggcgcataccacctgaaagctcaaacggatagcgcgacataacttccacggcatccgggatttgcatctcttccagcaggtcaatcgctttagctctggcttcccgacgacttattggttgatgatggcggatcacgtccatcatctgaagacctattcgacgtgtcggattgagggcggtcatcggttcctgaaagatcatcgccactcgtgcgccgcgccactgacgaagctgtttttcccgcgcgttaagaacatcttctcccagcagggaaatctgcccccgatgtacgcaataactgcccgtcggtagcagacgcataatcagcattgcggtgactgatttacctgagccggattctcccaccagaccgacaatttcaccgcggttaatctgcaaggacacattgttgagcgcgtgaacatcaccgttaaaaccggggaaactcaaatgcagttgttgaatgtccagaacgggttgggtcatgactgctttcctcctgctttcgggtcaagcagatcgcgaataccatcaccaaagagattaaacccgacggcggtaagcaaaatcgctgcccccggaaatgcgcaataccaccactgatcgagtacatagttgcgaccatttgctaccatcgcgccccattcagcactcggttgttgagcacccaggccaataaatcccaacgtggcggccattaaaatcgcgctaccgatatccagcgatgcctgcacgatcagcggcggtagggagttacgtaaaatatgccagttgatcagatgccaacgagacgcgccaaaggttttcgccgcctgaacataggtatactggcgtacaactaatgcttgcccccgcgccaggcgcacataaaagggaattcgcacaatagcaatagccagcatggcgttaaacaaactcggcccgagagcggcagccagtgccattgtcagtaccaacgaaggaatcgacagcataatgtccatgatgcgcatgatgatggcgtctgcgcgtccaccaagcacaccggatagacatccgagtagcgaaccaatcatacccgcaatggcaaccacgactaatccggcgagaattgattgctgactgccgaccagtacgcggctaaacagatcgcgtcccacttcatcggtgccaaaccagtgcgccgcagaaggcggcaaaaggcgggcggttaaatcaatggcgttgggatcatgcgtcgccagccacggtgaaaaaatcatcatcaatagcattaatacaatgatgactgcgctggtcacggtgagcggactgcctttcagcatccataccagttttgcaccgttaaatcgcgtttgtttttgtgggcgtacggcggacgtttcctcgcttagcatcattcaccacctccacgtccgatacgcggatcaatccacaaatagagcaaatccaccaccaggttgaccagcacataagcaaatgaaaccacgacggcaaagcccatcactgccgggaagtcgagcgcctgtattgatgttactacccatgcacccattccgggccaggcaaaaacggtttcggtgagcactgcgccatacaacaaatcgcccagcgccaaacccaatacggtaatcgatgggatcaacgcattgggtagcgcataacataaaacgatataccagccgggcaagccgctggcccgggcggtacgaatgtagtcttcactcaattgttccagcatcgctgagcggatctggcgagcgacaattcccaggtgaacgaacgccagcgttaatgccggtaagatgagatgttgcaacgcattgaagaagacttcaccgttgccttcaagcagcgcatcgagcagataaaagccggtaacgtgcgttggtggatccagccagtcatcaagccttccgccgccgggaagaatttgcagatgaccataaaacagcacaatgacgcccagcccaagccagaacgcaggtgtggagattccggtaatggccattattcgcaccagatgatccagccagcgatttcgccagactgcagagagtatgcccagcgggatgccaatcaggagtgccagcagcagggcaccaaaagccagctccagcgtcgccgggaaaaatatacgcaactcttccagcaccggacgcccggtacgaatggatgttcccaggtcaccatgaaacaggtcgctgacgtagcggtaaaactgtacatacagtggctggtccagtcccagttgctggcgaatattttccacgatagcatcgctggcgcggtcacccgccagtaaccgcgccggatcaccagggatcagatgcgagataataaacgtaatcacgcagacgcccgccaccacgagcaccagcccccagcagcgttggcgtaaaatactccagaaggtcacgttatttactcatggtattgatattgaagacctgttccagcatgggattgaacacaaagcctttcacctctttgttcatcgccagttggtagtttttctggaacaggtacacataagcagcgtcatcaatgacgattttctgtgcctgctggtagtcccgggtacgctgcgtctggtcggtggtcgcaagcgcattgcgcagtaacttatcgacctcactgttttcatagaacgagcggttacccggcagaccttttttgtctgactcaaaccagtaattcataaacatatacgggtcggcaaaatccggactccagttgccaatcgcaatgtcgtaatcacctttacccactctgtcgcgcatggtggcgttcgccagcttttccagcttcacaatgatgcccagcttgttgagactggattgtgtcgccagagcaataggctcccagttcggatcgttatcggagtagagaaacgtcaggctggtgggtttgctcgtcactttatcccattcggctttggctttcgtttcgtcatggttgtattgcattgccgtcgcatcgtagccccacatgccttccggaatcgggccgcgcatctgttttccgttaccactcagaatgccgttaaccatgccctgataatcggtagaccaggaaatggcccgacgcagatccgcctgattaagaggcgctttgctgttattcagatacagataggtaacgcgcagtgacggatactctgccacattgactttattttcctgcttcagggcgttgagttgatccaccggcagcgcatcggcaatgtcaatgtcgccacgggagagctgcaggcgacgggaggcactttcaccaataatttttaccgatacccgtttgaagttcggtttattgcctgggtaatgcggatttggcaccagaactaattgctgacctttttgccagcttttcagcataaatggtccggaaccggcggtattttgcgcgaggaagccgcgagcatcatccgctgcatgttcctttaagaccgccggattgataatggatgcaccgtcattcgccagcgtgtagaggaacggtgcgaatggttggctaagggtaaacttcaccgtatgttcgtcgggagcatcaatctttaaatctttgggaaatgcttctgctggcccctggccgatttttagtagccgctcaaaagaaagttttactgcttcggcagtgacaggtgtgccatcggcaaatttagcattatctttcagggtgaacgtccactctttttgatcgtcagacgctttccagctacttgccagatcgccttcaacgtcggttgagcctttatcaccgtccgttttgtactgaaccagccgctgataagacgggtaggtcactgtccagtcgttattatctattgttaccgccgggtcgagggtttgtggatcggcggccttaccaatcaccagcatatcttttggtacggcggcgtgcgcaaccgggaaatttgtggcaaggacgagcgcgagcaatgtgggacgaaacgatatcgatctcttcatgacagtttcctgattaactgacgtgctgtgtgccaggggatataaaacaagagaattgatcagcgagcagagggtaactcgctgcctggggtaattcgaagtgccaccattcgctggagataccgacaaaaccgccaccagtcattatcgcattcagcaacagccgattgcgctgagcggcgggcgggacggaagggtgataggcatgggagcgctcgtgcatttcatcgaaccctgcgcccatatcgaggatgttcccgtgctcatcacgaagcgtcaggtcgatcgccgtgccacggctgtgattagaaccgaccgtcacatcaacaacatattgcgggtctgggcaggcttgccacaacatcgcctgtgcttgttgtgggcgatacgcatcgtaaatcaccagttgtaaccctgacagctgggcgatgctgatacttttcgccagcgcggtaatcgcatccttgtgtaacagacaacgcgcttgctgataaatagctttacctgtgatgttatcagcgcaggcgtatttcaattcgatctccagatcagggaagattacggctaaatcaaccagttcggtggtatccgacataaacggttcctgtataagacaaaaattgctgcgctttccgcttatgcagatctcatgccatgccgggataagcgccagaatgctggcttaaagttatattttttaacttttgatcaacatttgtgcagcgtagtgcagttttggtgcaagaggggaagttaaggaaggaatctcccggaatcgtagctgaaatcacagtatttaagtgacagtgtcacgttaaatgaaaacccgcgagtgcgggcgagaggaatttgtcagattttcagcggtaacacgctgctcatccagcctggaatttcttcggcgggtagggggcgggaaaagaaatatccctgaataacgcgacagtggatcttgcgtagcatctcaaattgctctttggtttcgacgccttccgccacgacggttaaattgaggctttgcccaatgctggtaatggcttcaagtaaggcaaggatgcgtttttcggtcagacaacgatcgacaaaacttttgtcaattttgatttccgttaccggaagactgactaagcgggataatccggaaaagcccgtaccaaaatcatctaccgataagcccacgcccatatcacgcaggatctgaatgcgcttaaagatttcggtatcgtgttccatcatcatgctttccgtgatttctaccgtcagctggtggccgtcaataccccaggcgtgcattgcatcagacacctgattaggcagttgattactgcgaaagtgcagcgccgacaagttcacggataacgccgggatatgaatattctggctacgccattctgctaactgacggcaagcttccgcgatgacccagcgcccaatattttcgatttcaccaatctcttctgcgagaggaataaaccgtgaagggggcacatgaccatgcaggggatcgtgccagcgagcaagggcttcgatgccgtacagttcacccgtttctgcgaagatttgcggctggtaaaccagtttcagttggttattgctaatcgcttctttcagcgctgcgcctaaaaccaaacgctcttttaccatttcgttcatcgccgggctgaagaactgccagccgttaccgccattcttgcgaatataatccattgcattgtgagcagtggagagcaagtaatcgcggtttttacccaggtcgtagctgatgccaatactcaaggtaagcgggaagggtttatcgtcaatcattatcggcttgctgaccacattccgtagctcatcggcgatttgggtaatgttactgacgtcgttttcgaggctcacgaggacaaactgcgtaccttcgatacgacagagatactgatccggtttgagtttttcacgaaagcgattgaccacttccagcaatgcctgatcggcccacgcatagccaaggctatcaatcacatcctgaatatggtcaacaccgatgagatacaccacgggagagacggctttgtcgaccaggtcatcgaggtaattgtgcaggttattgcgatttggcagaccggtcatcggatcaaattggatgagttgttcaatatgctgacggcttttttcctgttccagcgccagcgcggccatatgctggctgatatctgccacgcgttcgataaaggcgctggtttctgctcctgacgaggttttaatttgcaggatccccgcaggcgcgccatcacgctgacgaatggtcgctgaccagctttgcgcattttgaatttctgcaccgtgggaagatgacgcccagtgtatcggcatcccgttgcgcagtgcgaacagcgaaacatgcgattcgttgagtacagattcgatgttacgacaaatgatttcccccatttcatgaaatggcgggctgctgcacatggcggcgagaatattgccttcaagctggcgaatctgccgttcttcggtgatatccgagaaagtcattaccaggttctgcagatgcgcgagcacgtcataaaccgggctgatagaggctttaatccagattttttcaccggtgcgcgtcaacagcagaaattcgtcctgatcgcgggcggttttccatagcaactgttgtaaacgaatgcggttatcggcagggaattcaggaatgttcaggagtgtatcgggctgcataccgctggcttcgctaatgcagtaaccaaacatttcggtaaatgcgcgattgcactgcacaatatggcgttccggatcgaggacaatcaccggtcggtcgagatggtcaacggcaataatcaattgtcgggtctgttctttttgcgccatttctacgctggcatcccgtaccagcgccaggtaataaactttcccctcggcgctcactttcgatagcgcaaaacgggtccagattttactgccgtcttttttctccagctgcagctcccgactcatcccctcaacacgcgctttaccgccttcacggttgtgacgaatgtattcaggatgcgcaggacgcaaatcccgcggaatcagcatatcaatgttattgccaatgacttcttcacgtttgtatccccagagcttctctgcggcggggttgaaaaacatcacttcatcattttcgttaattaacaccgcacccatcatattttgctcaagggcggggaaaaaaatgccatcggcggcattatccgcatcggttagcttcatgattacctctgcatcctggcgcatctaaagactggctttccagagttcaacacggtttctacctcgtcttttggcgatatacagagcttcatcggctatttgaatgaggcgctcatagtcaggatgaccattaaacatggcggcaccgatggaaagtgagagggcaatatcttcgccgtttgcggctttcagtttggttttctccacccgactgcgaatacgttctgcggtacgtaacgtttcgttttcagaagcttcagtcaaaacaatgataaattcatcgcccccgtagcggaaaacataatcactactgcggacgttgtcataaaaggcctgagagactttacgcagaatttcatcaccagtgttatggccccacgtatcgttgatctctttgaatttatcaacgtcaataatcagcactgacagcggtgtaccggtccggttggcatgggcaatttcgcgtttgaagatagtcggtaggaaacggcggttaagtaatttcgtcagtacatccataccgacttcgtggcgcgatacttcttcaaacaattcacgcagcaaggtaataatttgcgatacggtatttcttatctgtaataaaaatttcacccgcagacttctgttattcaaatttctggtgttacgcatggtttgattgaaaataccgtcgaaatcctgaatcagacgggagatatggcctacttcggcaataccactaaaataatgtcgacctttatggttaaaccacaggccaaaatcagcctggcttaaaggcaaactactgcctaaatcagaatccagcaggattttatagataatatctatttcccatgaaagtattgaggctatttgccgttctttttcttcttcggcgttttccagtaacgagaagatacgatagttttcatcttcctttgaggcactactgtcactaaaggtaaacgcgcgagtcatcacttccatcgcgatatcaatactgttaatcgagaaatggtagacctgaagtttttctgcggcggaataatccgaagagaagatcaccggatagaggatttttttcagcacccgaaaccccatctcgacaatttctaccggaattcctatgcgggcatgcacttccgcgacggtatgctggatttgtattagcctttcgacatcgtcaacctgggcagaaagcacgttaataatccagcgttccatcgcactcttcaactgccgctcaacttgttcattactcaagaattcttcggcatgcgggtcgatgcggacaattcgataaaactcgatactcagataatgagcatgcgcaacggcaatttccgcggctttagcacgaatgggcggatctgcctgttcgacaagtccggtccactcatctttcattcttttaaaatacatctccataattcacacccttataaggctgggaaatcagacggaatcaaaatgaaacgcaacgtgcgagatcgactaactgcaccatattctcctgaaatatgaagatatactgaaaagaaataagcgatttaggacagtttcaatctacgctactgttcttcagaagagtatagcccatcgtaattatttttcggtgacagcgaatatcgtatggtttttcatattcatacatttttattagggatttatggctgtttaactaagtgtggttaatttgacttaagtaagcatgattattagtgggatagtttaagagggtaacaagccggtgggtaaagcaccggcttgttacaaagtaagaatgggagtttaactgccccagcgactttgcagatagctgaccgcttgttgagtctgcggtttattcagatagtcctcacggaacaagatggtgccgctaatttcgggcacagcatcgttaagatcgagctgctttttcagttccggtacgccgccgttaatcatccagtctggctctatctttgaaggttcacccactttatagaaggcgataccgatatacaggcgggtcctggtcggtttaacgacatccgcccaccattttgccaacacgtcataacgcgcggcactccgtgagaacggccagtaaatttggggagcaatgtaatccagcaatccttgttccacccatcgacgggtgtcagcgtaggattcgtcataggctgccgcgcctcgggtatcggaaccgagcggatcgtgtgatcggttacgccacacgcctgccgggctaacaccaaattcgactcccggcttaatgcttttaatggtgtgcgatacctttgcaattaactgctgagtattgttgcgccgccagtctgcttttgacgcaaatgcgcctccgtatttacggtacgtttcgttatcatttagccgtgaacccggtgactccgtatagaaatagtcgtcaaactgcacgccatctacgggatagcgggaaaccacttctgcgactattgatgtgatccagtcctgaacctcagggatgcccgggtcgaggacaaagcgatcgccagacgttctgatccagtcgcggtgttgcacatagacgctcgccggttgttgagacagagtgctattcagttccctgatagtaccgggcttcgtattaaccgatacgcgataggggttaaaccaggcgtgtactttcatcccacgcttgtgggcttcgtcgagcataaattgcagcggatcgtaacccggattttcaccaatcttaccggtcataagatcggaccacggcaaaattttcgatggccacagggcggtaccgtccggcttgacctggaaaaagaccgtgtttatgccgagacgttgcagatgatccagtttgtcgatcatcgcctgttgttgtacacgggcccggctggtggggttactaatgttaaccgaggaaaccggtggccagtcgagccgagaaaccgtggccagccagatgccacgcatcggttgtgacgattgttgcgtcgtggctggtggctttgaacctgctggtggtgtcaccatggactctggaggcgtgcttttacaactacacagtaaaagtgccagtgcaactagtatcgctggtcttctaatcgttaatttcttgtttcgggagcagatatccatatgtgctggtttccggtaaacagatgtgcgctcattctcgtacttatccccgttaagtcaatacgacagcaagcacgaaaaagggagcgatgaattatcgctcccttgtcttataaccattcagacatggttagtgtttcttgtcattcatcacaatatagtgtggtgaacgtgcacgcgggtgcaggaagaagtgaccttttggtgcgttctgactgttgattggctccagagtgacgccggtatttgctttgcctttacgatcatgaacagcatagagaataaagggcagggcaagtaccaccaggaaactaacaaccagtaattcaacatacatatcggtagaatcaccctggatgttatccggcggcaggaaggaaacaataaacgccataattgaagtcagcagaccgacaattgccacgaccagtttcacccctttaccaccagggatattaaatgtgcgttttaagtcaggatgtttaagaaccaacacaatgtagccaataaacagcatgaaataagcacacagataaatcaccaccgtcagcgccagtgcgatcaggaaggacatgttgttaccgccaccggtattggtgaggatgatcaacgcgatagacgtaatcaccagctgcgaaatgaccagcgttaccggtacgccatttttgttcattttagcgaatgccgctggcagcaggtttttctgcgctgttacatacatcccgcgagaaggaccaacaatccaggaggcgatttccgccagaacacccagcaacagcagtgcggagatcacgcgaaccgtccactcaatttctggtgccacatgggacatcagaacggtaaaggtttgcattacccctgcggagaggttgatttcattacccggaatgaccatcgcaatagacaaaccaccaacagagcttaagcagattgccgccaccatcagcagtaacatagccaacggatagtcgcgccctgggttgctcatttcattgacgtgggttgcggatgcttctacgcccatataactcaaaatgaaggcaacaaatactaccagggtgcccactttagagaagtcagggaagaaggtcttcgaatccatttcgatagcaacgggggcaccggagtgcagataaatagccgctaatgcgatcaaaataaatgcaggtaacaggataccggcgaagaagccaactttagcaattcgcgccgtgtatttcgtgccaccaaactgcgttaatgccagcgcccaaagaatgatgagtgctgcaatagttttggtaatggggtcttcattcagcgctggccatttcaggatgtaggagagtgcccctaacacgaaatagagcatcggaataaaaccaatggcgatttgcagatagccaaatgagatcgctgcaaatccccatctcggccccagagtatttgatacccaggcgaagacaccaccttcttcccagccgtcgacggtggccatttccgcagcacaaagtcccacgggaataaaccataaaatcccgcctaatagcaggaagaagactaatgaaaagcccgatgttgcgaaggtagggtattcataaacagccattaccatcgatgccgttatggcaaagaatccaagtaatgtgagctgcttagctttacctgtctgtactgatgtagccatattatccccctaaaacggtattcctgtcggaaccgcacctgttttgttctgaagcgtattcagaacaatattttccgttgctaatgccagtgaacagactttggaaattgtcccgaaacgggttcgtttcgggacaccgttaccgttaaacgttatcaggtatgtttaaagctgttctgttgggcaataccctgcagtttcgggtgatcgctgagatatttcagggaggctttgtagtcttccagcaacagttcagcaaagtccatttcgaagccgcgacgacacataatgcgcatcaccacgatgtcggtggcttcaccgccgagagtgaaggccggaacctgccagccgcgcagacgcagacgttcagagaggtcatacagggtgtatcccggatcttcaccatctttcagtttgaagcaaaccgccgggatgccttcgtccgggcgacccgtacagatgaactcatacggccccagtttggcgatttcatccgccagataagcggcaacctggtaagaggcgttctgtactttggtatagccttcacgaccgaggcgcaggaattcatagtactgtgcaattacctgacccgccgggcgggagaagttgatggcaaaagtaccaatttgaccacccaggtagtcaacgttgaacaccagttcctgcggcagcgcttcttcgtcacgccagataacccagccgcagcccagcggagccagaccgaatttatggcctgaagcactgatcgatttcacacgcggcaggcggaagtcccagacgatatccggggcgacgaacggtgccaggaagccaccgctggcagcgtcgatgtgcatgtcgatgtcgataccggtatcggcctggaatttatccagcgcatcgtgcagcggttgtgggaactcatagttaccagtgtaggtcacgccgaaagtcggcaccacgccgatggtgttttcgtcacaggcttcaatcatgcgtttcgggtccataaacaactgaccggggcgcatagggatctcacgcagctccacatcccagtagcgggcgaatttatgccagcagatttgtaccggaccgcacaccaggtttggtttatccgttggtttgcctgcagcttccatacgcttgcgccaacgccatttcatcgccatcccgccgagcatacaggcctcggaagaaccaatggtgttggtgccaacggcctgaccatttttcggcgcaggcgcatgccacagatcggcaaccatatttacgcaacgcaggtcgatggctgcggattgcggatattcttctttgtcgatccagtttttgttaatggataaatccatcaatttgtggacattttcgtcgtcccaggtctggcagaaagtggccaggttctgacgagcgttgccatcaagatataattcgtcattgataatctggaatgcgacatcgtcgcgcatttcgtgcagcggaaaacgttttgattctgcgatagtggaaatagacttcgcaccaaaacgtgaatcgagtagttccgaccttaaatccgttacttgcttcttatccattttaaactccttaaaatgattggatcgcattaaaaaagtaggatttatcgataaagtaagcaagtgcaaaggactcgtgtttaaataacaaaatcctaatgttatttatcgtgagatattacgcgaataatattttttcattgaaaaacaatacaatatgaaattcttgggtggtggtaaggtgttttatgctgttatttttatgcgcattctgtgtctcctgaattatcacgtaaaaatcagaccttaaaatatcactattagtacttgattattattttgaacgcatttataaaattattacataaaaatagcgaatattgctaaaatccccgccaacgatgtgttgacggggctgttattattttggcaataatactccggtataagtatttaccggatgagaaagatattgtttaacggcagtgttaacattctctaccgtcatttgtttcaacaattgctcctgctcagtccatgctgcaggatcgtcatattgaataagactatttacaatagtgttcgctaattgttgaacgctacgctgttggatatcgaggctgcgctgaacgttttgctggtattcattcagttcttgctcactgatccctttagccagacgcttaaccatcacttcattcgctaacgttaacagttcatcatgtcgttctggttgacaagtaaaagccagcaaatgactgatatctttggcctgaggatcaaccgagaggcgagaagaaacgctgtatgctccagatgcctgttcacgaatattaacacgtagatcttttgccagtgcgacgttaaaagcatcgagcgccatacgcgtcggcagattaacaggtgtccgggaatcataacgcttccactgtgaaacctgtgccacaggttcattttgttcttttacagtaaccgatgcgttgtccgtcgcgcgagttaatggtttacctgcggctaatggcgaatcagagtgtttgattgatcctaagtaacgcgtaattaacgccacgagtttgtcttctgcgacattaccgacaatgacaaacgtgatatccgctggagatgaaaacaattggcgatcggcagccagcgcatctgcggcagtaaactgtgcaatctgattttcttgcagtaatttcgtgcggtcatcagcatagcgcgtctcatacatctgctgggcgaatttctccgctggacgctggtcgagcgttttcaacgcctgaatttgagcattttgtagcgatgcccaaatattatcgttaatcgtgctgtgggtgattcgctggttaatcaactgaaaaccaggttcagggttattagtccgcgcgctaacggagagcaacgtattcatgccactgactttactgctcatggttaccgaattttccgcactccagcgtttcaggctggaagaggagagttcgccaacgccgcttccgctaactgctttatttgccagcgcgataagtgatttttgctgcgcagggaaacttaaatcgcctttattcgatacggcaataatttgtagcttttgctcttcacccgcggattttgccagaataaccctggcaccattggaaagtgttaatgatgtcagattctccgccagcgtttctttgctgctaatttccgcctgtgggtctgcgtctactgttaacgataaatttctgcctgggaagacgtaagccgccagctttttgttggcgtactccttttccagcgccaggatagccgcaggagacaatgcttttttggcggcaacctcattgtttaccatttgctcccaaaatgcgtcctggttctttcttaactgctgccatttttccgccagactttgcacggtaatttgctgccacagacgtttcgaaagttgatatgtctcttccggcgacaagaacggcgtattatttaatgagctggatgccaggcgactggtcagcatacgtaaatcacgttcagcttgctgatcaaccgcatttttcagccaggtgaggcgggtagatttgacatcatcgagttcttcagcagaaaaaccatgctgatcaatggttgccaactctgccattaatgcattcgcagcatcctgcatattatcgtctcgtgcatttacacggaaaaacagcgactgataatcgggtgcaattttaacgctgcgcgcagtgccgccagaaatagtcttcaactcgcccgactgtatgcgttcctgcagacgttgattgaacagctgaactaacatgctccattcagcttgttcgataaagctttgctcatcgttcacttgtaccattggcaggcgataatagagtgcgatgccgttcacccggttttctttatcattaatgatattaaagcgcaggtggttttcggcttttgtcggccagacgcgattttcagctgctttgttagccggaagcttacttaaattatcctttatcagcgccagcgcttctttactgtcgatatcgccgaccacgataaaggtcatattatttggttgataccagcgttgataaaattggcgcaattgtgccggtgtgaccgtggcgacagtatccatcaggccgataggttcacggtctaaattacgggtatttgccagcaggaaagggcggcgcgcctgagaggtgcgccatttcgcatcctgatgggcacgccattcctcagtaattacgccacgttcagcgtctacttcgagtttttcaaaggttgcggcattactccattcactgaagattgccatcacttgttgcagattttgtttctgcgtagtcggcaaactcacctgatacaccgtttcgtcatagctggtataggcattaacatcgcgaccaaaacgcaggcccattgactcaaatgtttcgatgactttattacccggccatgtttttgtgccgttaaacatcatatgttctacaaaatgagccacgccgagctcattgtcttcttcctgcaatgaaccggtatgaatttgcagccataaatttacctgatcctttggatgagcatgcggataaatcatatatcgcaagccattgtccagttgcccggtaattaacttttcatcctgcggtaaggcggcggcaatcagccgcccggggagcaacagagttgccactaacgtcagtaagaaacagaggtttctcataattatctccatgcgaaaaccgggcgaatttacccggttaagtaaaatccgaactattaaaatttcatgctgacatcaagccagaaagtacggccactggcgtaggtcgccacaccggtgttcgttgtatcaacagcggttttgctatccagtacattgagaatatcggcactgatcgtcaggttttgttgttgcagaaattgtggcgtccaggacaagcgggtgtcccaggtcaggctgctatccagtttttcgtcaacatactgcttgtaatctgaatattcgctgatgtattgcgcatttgtcttaccaaggataatgcgagctttacgcgcttcttgccaggccagcgtattcgcccacactaacccgctcggttgatgcgtgaaatccatgtttaaggagatctttaatgggttattaaaatctgccactggaacgctatcgtaagagaccagattaccgttataaaccacctggttatcaccggtattgctctcctcataaccattgtttaacgacaagttgcccttgctcttgatatagctaaagacaatttgtgggttaatatctacctggcggatatgcaggggttcggccagttcaaaactgaggctgaacgaatgcgttttggttttgccatcgttgttatattcagtaatggtggttttagtcgcgctgtcggtacgactgcttttgctgatttgatcatgcgcttcacggtaaacatagtttgcacgcgcaataacgttcttaccgattttctgctgcaatcccattgccagttcatcgttataaggcgttttcaaatcctgataacgcgtcagagttttattacctgataccgattccgtccagctattgcggatatcacgtaatcccatatcaagaatattcccgccatagtaacggttataacctgctgtaatcattgaggtttgattagcaaaaatatcccattccgtcataaagcgcggggagatattgtggtttgacagatagttgtcatagtcataccgcacgccgggcattaatgacacattacgccagctaatgcgatccgccatatacagcgtgtagttgtcaattcccaggcggcctttacctttatggtaaatggtatggttagttttctttccggcagcattaatcacataggattcagactggttatggcgttcagtccacgcatcggaatagatgtattccgcgccgaagtagggttgatgcgaaacattacccacggcgaatttttgccagtccaggcgtgttttgaaggtgtaattatctacagcctgggaaatgtgtcctaatccgccacgggtgcaacgccctgtaatatcaccatatgtacatgaaagttcggtgtaccagatgtcatgatcgtgacgggtataatcactaatatgatcccaaccaacggtggtacgcagtttggcccatgcgagctgcgtatccatatcccatgccagaccataggatttattacccatttcgcgatcagactgcgggaaggtgctggtattataatcacggctggagccggtatattttaaggttaaatcgtgggtaaagcggtcgctggcaaaccaggtaaatttgcttaatgcagtatcgataacgtttttatactgtgcccgaccggcgacaatgccgtcattcgaaacataatccgcgcgggtgatatcagactggcggcgcgataaaccggcggtaacgccgaagttatcagcgagttcctgattaaacgacaaggtataaaagttctttttaaaatctggggagtaataagtacttcctgaagagccttgattaaatgcgctcttgttattctcatcgatatgcgatgttaaccagtccgaacgcgtagtgcgataacccaatttcaccttgctatcatcagcgttgaagcgtttgatctttgcatcaattaccccgccattgaagcgaccaaattcaaccggcacaaaactgtcataaagcgtcacattgtccagtaagctgacatcaagataatacccctgtgacatcccgctaatattggttgcactactggcatcggactcattcgctgggttcaggttattagttgcactaataccgtcaatcaaataggcattctggtagggcgacgcaccgtgaatagagattttctcagggcgaatatctccctggttcaacgaggtactttgcgttgaatccatgcgtaccgcagggttggttctcagcagatcgctgatattgccattcccggtcggtaaacgctcgatgctttcactggtgtaatgcgtgttgccgtttacgggtacagggacaggagcatagaccgtcatctcttcaaaaaaatgcatgtacatgtttttgtcatcgacggcctgcgccacatcagcgccacataaaatgacgccaggaataagaactcgcttcatttatttatatctccgtacagcagggcttttattgtttttataaaaccgcgctaatgtcacaaatatcatcggccaggttccagacaccgggttgatgtgtaaccataatgacgccgcttgtgggtagtttttcacgcactaaacgcagtaagcggatagcctcttgttcctcaagatgagaggtagtttcgtcaagaaatatccatttcggacgtcgtaaaattaatcgtgccagggcgatacgttgtttttcgccgctggaaagaatatctccccagcgatcgtggtcatgaatacgcgcagccaatttcccaagaccaacctgatgcagtacttcgctcaacgatttatcgtctacgggcaggggaagtgctttacaaataatctctttcagtaagccggttttgattaacggtgtttgtgacacataccaactgtcagcaggagaagaaatatcacctttaaaccacggccagcagtgggataatgttttaagcagtgtggtttttcccgcgccagagtagcctttcagtaatagccatttgcctggcgaaacatgaaagttcaggttctctaatatgatcttattatcaggcgtacgaatactcgcatcagccacttgtaccgcatgttggcaatttttaggcttattcgtagggcgctgttcagtgagttgatggaactcatacaagcgatcgataaccgcagccagttcagcaagttcgtcatatttataaataaaccagcttaaattgttcgataccagcataaatgcctggcgcgatttcatcagtccgcccagattgatctgcccgctaataaactgcggcaataacagaaagtagggaagaacgctaagcgagcgcgaataaatattctgccagtaatcaagccaccgctgacgattcattaaacgatgccagttctctttaatggtatgaaaattgtcgctcaactcctggcgttgtagagactcagcattgcttagcgcaatcagttctgcctgcttattatgctgcacaagatttgttcgaaatgtcgcttcgctacgttgtttttccacattaagcggacgaatacgtttacccaccttatgggtaaataaagttccaccgatcacaatgagcacgacggtatagaccatatacccctggatattccattctgttccaccaacagtgaatgagagcgtacccgcgctttcccaaagaataacggtaaaggtgatcagcatgctaagtgactggatgaagccaaatgaaagactgagcgttttgctgatcagtaagagaatgtcttcagcgatacgttggtcagggttatctgtatttttatgctcgccgtagatctgcgtgaagtagtagtttttatctgcaaaccaccgattaaggtagtaatctgttaaccattcgcgccagcgaatagtcagtagtttaattaaccatgttttgtttacggatattaatacaaagatccccagcagggcagggaaccaaaggacaagctgccaaagcttatcggtttctttctggcttagcgcattgaaaaaatcattattccagtcgtttaaccagacctgaattttaaccacgccaaggatcatggcgaggataataatgattaacaacactgaagttttattattcttacgcagccaaaagggcttcaacagacagagatactttgctatcaacatacgaagcgtaatgggaatggttatcattagcgaaaattgattgtgccatccaatgattatctatggcaatgatttactgatgaaatttatttaagtatcatttaacaatatgaaatataaaggaatatttcattttcagtggttatggttatgctattgataatcaaggatattgctaatgccctgatgcataccacgtaagccaggattttcgcaagggaagatgatgatgacgaaacacccgacaggaatttatgtcgggtgccttgttaaggtcataagaaggaggctaagaatggagttaaaagagagcgttattaattattctccatttgttttgcaacatccataatgtggtaaagcggtactctgttcttagctaactctaccatggcgttcatataaggtaccatggttgaaaaaaggattttataaccttcgcaaaaataagaaacagtctcattgtttactttagtaatacgatgcttaggacaaccgccattgcagataggtttatatgcacattgctgacatttcgctggaatccgttttttttgcgctgtcagttgtacactgttcatcgttttgagttcagatttattaatgtttccaattttgtactgtggatagacaaaatggtcgcattcgtaaatgtctccattactttcaacaaccagattatccttgcaggactcctggaaaatacaactggtatgcccattccccaaaaaacggctgacaaagctttcaaactgacggatgaaaatttcacccacatcgtttttaacccattgcataaaaatggttgacataaacttgccataagccgtgggaggcacagaaaaatcaatgatacggaatgtgttctcactatgaccactgaaatcaatattcggcgtcccggtttctagcaattcgataaattgcatatgtttactgccgatagattttaaaaaatgataaacctcaagagggtaatggacattaacgttattaatgacggttaacgtattaaactctacttgatatgatttcagacgctcgatggctgctatcacttttgcaaaagtaccgttacctgaattactgcgtctgtaacggtcatgtaactcctgggggccatcgatcgagataccaaccagaaattcatgttctttgagaaaggcacaccattcattattcaataaaatgccattcgtttgtaatgcattaaaaatacgtttttggcctgcatagcgttgttgatagtgaataactttacggaaaaaatccaggccagccagagtgggttcaccgccttgccaggtaaaatagacctgattgccagacgctgcgatatattgtttgatgaactctttcagagtgctgtcatccatccatttttcatgagtaaactgcgactctttttcaaggtaaaaacagtaatcacatttgagattacattgaaaactggagggcttggctgtaacgtgcatcgctatctcgctcaataaggcggcggaaaaatccgccgcatgaaggtttagttatttcgcttcgcttagtgctttcttgatattgttaaacttctcctgatttacctcgctaagcggtggctggctgctgtcgataaactctcttaccacgccttgcatctctttaacgacctgcggattggcggcggcaaggttatctttttgctgtagatccgtcagtttgtagagacctaactgattgttttctactgtatagacaagcgaataatcgttatttctcaccgtataagagaattggcttaagtcctcagtgttggggttatgcgggtaatcgtctgactgatggcgaacaaatttgtggtaattatcccagaatggaatattttcctcgtcaaaccagtgagaataagaggttatccaggtcagatttttatgtggctcgccttgtttcttatcttgcaaccagggcagcaaggaaacgccatccagcttaaggtcttttggaatgctgatatcggctgcatcaagagctgtcgggtagaaatccattgcggaaatcagcttgtcataattaccgggttgaagttttcctttccaccacataaacattggggtgtgagtaccgccaggataggtctgactcttatagcctttttgcgccccgttcagcggcagaggaccatcgataaccgcaccattatcggaggtaaagagaataattgtattgtcatactgtccgtttttcttcagttgttcgagaatgcgttttacaccctgatcaacagaataaacggaagcgtagtagttatctgctgtttgactaccggtattaaattgcttctgatattgatccggtgcaggattatcatttggcaggtgcggagcattataagccaggtaaagcataaaaggctggtcaagtgttttggcacgatcaacaacgccaattgcctcatcggttaactgatcgctgatataaccttttgcggggacacgttcacgatttttgaacagtgaaggggagttgtaatatgccgttcctgcagcgtggaatcccataaagtaatcaaagccacggttttgaggttgccattcttccgcagaaaatgtggtgaagttgtcatgatagtcacgcgtttgtttatcttccggtaccggcacattactgatttttgacaagtgccatttacctactgctgcagtgtaataaccatgattctggaataattcaggcaagaaagtttctgttagcggaataccatcctgagcatcggtattggaatagacaccaaagcgggcgggagctcgaccggtcattattgcggcgcgggaggggccggaaacaccgtgtgccacatagccgttagtaaaacgtacgccttcatccattaatgaaaggagcgtcggcgttgatttttgtgcagcttcaatggctttatctatccctattttgtaggtatcgacaacttcacgattttccattgtttttgggtcaaaagatcccttatcaaaaggaagttgtccataaccaagatcatccatggtcagtacgataatatttggctttcctttggtactgtattctgtcggcgtaaagtctgagaaagcaacgtttgttttggttgctttcagctttacatcatctgccgcatgagcagcaaatgcagccataccagatgccagtatcaaagatatcgaggtacttacgacacttttctttaatgcagacttcataaatgttcctcttcttattgtacttaattccaaagtaattttacgaagagaaataagtggatgtaagtgaagttagtcacataaagagatagcagatttagctaaaaaaagggaaaaaacagtccataaagcgttgacattactttctgttctattaagtaatttctcgccgataaacaactaatttattgatatttaataaattattgcattttactgacaaaatgcagaattgagatcataaataatcatgcaacaggttatgcaagtgcataaatatgtgatggatgtcacttatttatttcaataaatatatcgcctaaaaacaacgcggggcagggaatggctgccccatttaattcttacgcagcgtgtgtggttgactactcgttagcaaataatcaaatagctaaagcattcatcgtgttgcccgtattcatacccgtgtgactttgacaacggtactccttagaaactctcttcggactgttgccgaaatgtttgcggaacgcataaataaaataagatgtactggcataaccacattgttcggcaattttattgactgaaccttctacgcgtatcaaattttttgcgtgctgcattcttgcatctaaaagaatctgtgagaatgtcgtttgctcttgcttaagttttttcttcaacaggctttcactgatgtacaggcagtcacaaatatctttcagcttccatgggtgcgccggcttcatgttgacaatatttctcactttcccagaaacggatagcacaccgttagttaatagtgtaatgaaacctttgcatgcggcaaaaatagacaggcaagaaaaaagcaaaagttctgaaaaattatgatgattgcgttcttccgagttgagataagcaatcatttcattaagcaatccagtcggtacatttgaagcacgtaaaaacttcgcaggaacaggcaccgtcactgtctggatgttagtgcattgtagatattttttaatggtattttcagtaaatccgatctctttaaaatgccgctcataaggttcaaaatgcgtacgaacagcgttatctaccatcaggatctcgccgtcagagaaggcgtaatctttatctaaaatgttagcgttgaaggcatgatgaataaatataacagaacaaacgagcgacattttatctccttaaaacaataaagtttttatcgatacttttttaacatttcatatttataatttgctgtttgttttcagccttgcaaactattgataatgaaatgtgtaagatctcttgcaatgcgacccatttctgaaatactcagctgatcaattgccgaaaaaatggctatcaacgtaagtgtcagtaataagacaaccacaattgcagacatgatttctttatagttgtctctttgcgtgattttgtttttcactgtggtcgcatgcatttcaaatatgtttatttagcggataacgttaaaaatcgttaatcagtatgcttaatataacaggctggagaaaagaggaaataggactggtgcttcagtactgagcggagtttcttacagctgtaggcagaagtttatatcttatagtatgtagtttaatttaatccatgtgagcaaattgcgaaataatagtcaatgaggaattcttctgctgtgcggatgacagcagaagaaatgagaagaggcattaatttgatggttctaattcaaccggaatacttttatagccaggaatgccacttaatggatcgtggttatcaagtgttagcatgtgattcgattctggaaaataggtcaccagtgagcggtcagccatagggtaaatgaccacttttaatctatccatgcggcgtgagctgcgcttaccgtctggcgtaagcgcaataagattaactctttcgccgttttttacacggcaaattttagcttgtttagcactcataaagaccacatctcgttgaccgaatacccctcgatagcgatcatccataccataaatcgtcgtgttgtactgatcgtggctgcgtactgtcgccatgaccagcttactgttaaacgctgaagagggatcttctaacagccctttgctggtaatgaaattagccttacctgacggcgtcatccagcgcctttcagcagctgcatttatcaggtgaaaaccaccgggatgacggatgcgctggttatagtcggcgaactctggcagcacagcttcaatgtcattgcgaatgcgatcataatcttccaccagatactcccaggctaccacgctctggggtagtgctgcctgcgcgattcccgcgaccactgcacactctgatttcagcattacaccggcgggttttaacacgccacgcgaggcatgaatcatcgacattgaatcctcaacggttaccgcctgcgcaccgtttttttgcatgtcaatctcgctacgtcccaggaccggcagaatatagctatgccgtgcggtcaacagatgagagcggttaagcttagtggctacgtgtaccgccaaatctaattgcgttaacggtacagcgctcgcttcccgatctggcattgccagcgcaaaattgccccccatgcagatcaatgctcgagcctgccccgtacatattgcttgcatgctggcaattgcagcatgtccaggtgcatgaggtggggtgaagccatagcgctcacccagacgagccagaaactctgcagacggtttctcggtgataccgacggttcggtcgccctgtacattagagtgtccacgtagtgggcagatacccgcaccaggcttgccaatgttacctttcatcaacagcagattgaccagttgctgtacgttctgggtaccatgttcgtgctgagtgatccccattccgtaacagataatggtgcgttcggcagcggcatatgcgtcagccagttcggcgatttgtgtctgacttagtccagaaatacgttcgatatctttccactcggaattgagaacgtcacggcgtagctcgtcaaagccgacggtatgcgtttgaataaactcgtcatcaagcaatgaaggccgacctgcggcgcttgcagcatcatcgcgctcaattaacaggcgcatcatccccttgagcaacgccatatcgccaccaatgcgcacgttatagtaggcactggccaactgagtctcagagttcgtcagcatttcaaacgggttttgcggtgcggtaaatcgctccaggccacgttcctgtagaggattgatggcgatcattttcgctccccgtttcactaaagcgcgcaacgaagtcagcatgcgagggtggtttgtaccagggttatgcccaatgcaaatgactaaatcgcacttctcaaagtcttccagcaacacggtccctttacctacaccgatactcgctgccaaacccacgcttgtcggttcatggcacatgttggagcagtcgggaaagttattgctcccgtattcacgggcaaaaagctgataaagaaaggcagcttcattggaagtgcggcccgaagtatagaattcaacctgattgggatcactatagctttgaaggcgtgcgccaatttcgtcgaaagcttgttgccagcttaatggcttgtaacagtcgctgacggcatcatatttcaaaggctgagtgagtcgccccgcagcctcaagctcgtggtctccccaggtaagtaatgattgaaccgtattctcagcaaagaaagaggcgtttacctgcttatccgtgacttcccaggcgattgcttttgcgccgttttcacaaatgtcgaatgacgcactgtgcttaggatctggccatgcacaacccggacagtcaaagccctctggcttattcatgtcaaacatggcaataacatcctggcgtatatccatctgcttacgtactgcattcgctacggatttaacagcaccccaaccacctgcagcaccctggtaggattcaatttttttcttcatctacttatcctgtgtggaaatgaattattaggatttgtaatagcgatgatgcacagtacatacaaagggattatcgccaacatggatatataagagtaggggactactctctttctatttttaatctattatcgttaaacaatagattaaatacgataagttaagcatcatctctcatagtgtttaaattaacatatttttcaatataaaaaataagactctggcttcaattgtgcgcggattttcttacaggtgtaggctaatagccttcacaaaataattatccgcgcaattttcgtgaatggagcgcatagactaaggtcaaaatcacaattattcatagataaaagtgacaccaatgactgactggacggttccggctgaaaccttgtttcctgtttgtccataggttgcgcttaaacccagaggtactttgcttttatttactgtccccagggagacattttctcccgtagccagtatttttccattacgcattagagtgacacccactcccgatgcttttgttgcatcaggtgctgtgttagcaaacacttgtcggctactgtcagtggtggcacccgaaagataaaatgagagcttttgttcgcttgagcaatatacgccaaggggtatttctgcgcttccaggaaagtccgggagatccacggtgacatttcgactatcaacggtgcagccgcctgttggcataacaacattgttatttgaaataatattccacgtaaaattacgcggatttccgcttcctaatgttgcaattttatacatatgaatacgggcaatgacttcccccgcttttatgacaactccaccggccgccccaactggggtaatatagagttttaacggtaatggcatcggtgtcttatcaccaatatccaatacgttggtatttgtcgtcaacgggaaggggtaggtcacattattccagtacagcgatcctttatatgactgtagggagcctgcgaaagctgagccttgtaccaggtttatatgatcagtgtcgtaccagccgccgtaatcattccagcaacttatatgctgagacaagtctacaaccagattctggcccggctgtattacagggtcgagattaacataaacagaggttgtacctgctccaatacttgacccgccatcgacattacaactgaaggcaaaaactttgcctgccattaatagaagataaataccgaacaggacctttatactgattgttttacccatgatatatcctaaggttaaaaattgatttaaaaagaaggctaagaaaatcgaatcgacgttattgccaggtgtagatcacattgattagcgcctcgatcgttccctggcttgcgtttccattcaccgtgatagctcttgccttaagtggaaactgtgcattacgagtgatctcatcaacaataaccgttttgctatcgccattttttaacgcagcatcctggtcatccctcagctctatctgaatattttcggcagtaccttcatttttgtaataacccgtattgtcagttgaacctgtcacgattgccgtcactgcacttgtttcaaccggacaatcggttaatgacaaagtaatattgtgccagccagatgcagaaccaggttgttgcagattgcgcgtataaagatccccgagattaacgttagcttctttggtttgaatagtgcagggtttagcgactacccgaccattaacagtgatagtgacatcggcggcctggagagttgctgtgaataacgcgcaaaacgtagctaacaggaacctcttgtgaagtcttttcatatctgactctgattattgaaattcaagggtaaaggttgccgaagccctcaccagtcccggattgacggacttctgagttgacttcagacgagcggagtaaggcaaaatattgttctgttctggtaccagtgggatccactgcatcccggcatgaagatcattcagtttcaccggacgcatatttgcgtccaatatttctatacccaaaccggaggccgtattgcttccttcatccagtttcaacaaagtattattttctgcatcctcaataccgttaaatgcaacccgaacccccgttgtccctttgctgcattcacttaacgtaatctgaaaagggacggctggacttgtgctaccggtcgttggaaattgtctggcactgtttttttggagatctacggtaaaattaagcgaatccgatgagactgtgcagccataatcgaggacgcgcccgctaattttaataacgctatctgcggataaagcagaataggtggttaaccccagacataaaccgaggaaaataatgttattgtatttcataatctattgttccttagcgacagattgctgtctgctggttcagtaaggtaccaggagaaacttcaggaagcttgtactcgacaatacagtttgagtttttatctttgccccatgaaacctgtaattgccctgactgtggaagtccagtcagataaacctgaccattttccgcgacaatgctgccatttttattctctccgtgtgtgacaattgcaccgaatggaacgctcttattaccgtacttcaacgtcattaatactttcccgccgatttgtgcattaaatgttgctctggcaatagcaccgtgagttgggatgacagtgaccacggtttcatccagttcaacattatctgcaagggaattcgcgttaagagcaacacggttttctctatattctgtcgcaaatggtaatatggcatagccacgccagtcggtatgaattccggtctggttctctattttgacattatcagcaccaggagccttaaccagaaccattgtgtcgcccagcggctgtccaaaggtgatgccatcagcatgagcaataatcccaccactcattccgtaataaatctggctgctgtcaccactccgactgtaaccgacattagtattaccataagctccacgataattaagagaactgtaaccactggtgccagacgatgtattacctccgtgggtgttaccgacctgaacgctataattcaggttattatccggcagcagagtgccataaacccccgatagattggtcatgccgcctttcaaatcgtttgacatactgtaactggcgtttgaattacgaaatgccgactgactgtctgtacgcatccaatgactgaagggaacattaagcgtaaaagcgagtaaatgatcccgatcgttttgccatatattattggaatagctgtaattcagcgaagtcgtaatatcaccaaacggcacatttaatccaaatgatatttgctggtcgctgcgtgacgtgttccagtaactttggcgactggcactgaaaaatgtcgtaccgtaatttccaagctgctgagagatgcttatttgttcctgaccacgcttactgtagaacagattaaaataatcaataaattgtgtctgctcattggtgtctccggtaggaggcttgacggtgtaaccactcattcgactgtaggcactgtcggataagttataaaaaccttgcgtagaatagcgatatcctgcgacctggatattggttccacaacaagtttattgctgcacttgttgaagagagtatttgcaaaaacattttatgtcgctaaataacatgacgatttcattatgcatgttatttataaaccgtgactaaacagaatattattgcgaacaagggaagtgtcaggaaaggtcaagagctaccaatggttaatatggctataaatcattagctatggttaatgtttgcttgctgaaactaacaccgaattgctctaaacagataagtgcagggtttattaaagctgtccgacagactttcttaacctggtaatatctctcttgggtgactctccaaacatccgcgaatattcccgactgaaatgggatagctttcgtaaccgacagcataggctgctgtggtgacatcgtaatgttcattcagcatctgtcgcctgacttcattgagacgtagccatttctgataccggagtggactcattcccgcttgatccgtccttaaataagtaacagcaccctctggtgttttcgtatgcagtgtctatgcgacagacactgcgctcttagcatggggcagggaataaccaggctatttctccatgcacaggccaattatgaaagaggagaggcttaagttcttgaaccctgaacgaataacgactaccagaaaagcacttcgcatcactcagacatgatttaacataatatacattatgcgcaccaatataaaccaaggaagaatccagtcgttggcggtcatgattgtcatgctcattaacaatgaccaaaccccatatctcacttactaccgtattctcggcttaaccgtccatgcaacctcaacacattgctttcaactgccgtcaccacgttctccggaaaatctgtcggtaatgaagtcttcacgttatccagtgctgctggaatcattctggcaaagtcactcaggatttcatgcatctgcacttccgggaatctcagcacctttgctgtcgccaaaaaatgtcgcggataaattttatcgattgccgtttttttgcctttggatgcgttaagccccattgccagtttgagatcgctgatgtgtattcccgtaccgccaaggaccggaaatgctgaaatgatgtcgtaaaatggcgtgagtcgataactgccgccagcctgaataaatacggagaagttttttgcatgaccgtccgttgcgccaatcaaccactggaagacctggaatttcataaaatcatagcgatctttcagcgcctcgctggaccccatcaaaaaagccatgatccgcgcgatgcctgggcctccatctgattcatatttcaccgatgaaggtaaaccgaatgtctgacacatatcctcctgtggcaagcgaagtaaaaccgttcgctcagcattccaacgcctgtcaaaacgttcgaccgctaacgcgcgcacatttcccgctttaatgatttctgcgtccggaacattcaacccaagttctttcgccagcagcagacagtaatactcattatcaacgctttggctgagatcgagcgtcgcattgggctgcctgatttcgccaatcggtaatttaatgatgtgcgtcgtcggcgttattcctttcggaatgcaccagtcattgcctattctgagcagtgctgtcttctcctgtgcgccagcaaccgagatgcgaaagtcattttcttctctaatcatgcctagcgggatatctgctttataagccgttaatacttcttcaagtctggcttcagtaagcttttcccatgccattatcggatgcgttacggtttcgtcttcgggtattaacgtcacggcaccaacgctgtctcgccctatttctgacaataaatcaaacggttgtctggatttggcatgataacgtttaacgatccggtcacgtacaatcgggctatcgggtaacaggttatcgaagaagttaaatacggcatcagaggtgatattccccctctgcaatggcagcgaaagtgacaacggtctggcataacggcttgctaaccactccggtgcatacttaaaggtgtgcgcgccgttggctaacttcgttaactcgcctacccgctggttgttcatccaagtgacaagtttaggcattaccactccagattttgctgttctgttgattctggcgaggcatttttcgcgtcgcatagcgtcattgagagttcaagcgactgtaaaatcttaaaaaatgtcgtgagcgtggtattgtcagggttgttttcgaaattggaaatcgtcgcctgcttaataccaatttttttcgccagctcgctctgcgtccagccattttgctggcgaaccagtttcattgcattcgccaattgcgttgggctatagatcttctgaaagctcatcatgtcatacgtccacagcaagtttatccgcttaaggggatattataagttttatcctttagtgaggataagtcaatctggaaacacatcttatccgctctacgggataaacgctgcgatatccgcgatcgcggataaaaaggaggatttaaataaggcgttgatgcgccgtttgaagtcggcaatattaagccgcatgccatctcgacatgcggcttatacggtttaccagctatatttcactcccagcatgccctgagtatcgctatagcctttatcacctagttgcacaccgacattcccccacaggctaaggttgttatttactttcgcctcaaccccggtacgtacttcaccgagattacgcgcaccttcacggcctacggtttgaccattcatcttcacggcgtagactttgctattgttgatccagttcgcttcaatgtaaggctggaactcacgctgtttaccatcgtcacgctggtgatggctgttcaggtaggttttcaccccaagtcgcgtttgcacatttccgtcgccttccgtttcaatgcgcgttccgtctttccgggtatggtcggaatctttcacacccatccaggtgatttgcgcctgtggctggacgtaccaggtattcagcgtcccttcgctgccgctaaatgttcccgcttcaaaggtatacccaccctcaacagaggccgtcacaccgcgagaatcatagtcgtcagcagaacggttatcggaactgacgctgttatcaaaccagttatacagcgcccagctgtcaacataagcgccggtcttattcgcatcgttctgataccaggtcgcgtacagcccagcgctgtaaccgctgatgcgcccatccgatttataacccacacgattactctgagtattactgtgctgattggcgtagcctgccatcacgccaagatgccagcgatcctgcgcgttgctactccactgcgccaaatcgccgcctagctgcaatacatagcggttagcctgagtatttagctgaccgtcaccggcccttgaacgttcgtgccctccgacatgacgcatccacatactgcttgccgacccctgagaatgcagtgaatctgtatactgcggctcacccagacggtcgtgtaaacgatggctaaacagcgagttggctgcggcaatgttgctgatatagcttccggcctccgggcgataaactgatgggccttccggatccacaacagggggattattgatgggatcgggtgtatccgctggcgttacgccgtcccatttactggtcagataccagtttttctcgtcattccccttccctttagccagcgtgtagacgtaagccccagcttcgacagttccggtggtcagcgcgaagttacctgcagaattaccgccaacctcaatgagttcaataccgttgaccgtttgtgcaccgacgccgccaatgttatcaacccgaacgcgagtgttcccttgggtatcgcctttcacgttcatcttatcggtgggcgaattatcgccgcccagcgtcgcgttgaacgtcatcaggccattgtttccggtatagttgccgttaacggtcagtacattccccggtttccccccttcgctattcatttgaaccgtgccgccattctccaggttgccgccgatagtggttttagcgacacgcagtgccccccccaggcataacgttcatatcacctgcagtggtgacatttcccgacatcacaccgctgttatggatattaatgtgttgacttgccatattaatggcagagtcggaaccgaaagcaatttccccccccacgatatccgtcgtaccctgatacgccgcggaatcgttgttaagagtcaggatcccggtacccagttttgtcacatcaccgctaccgctgatactgtgcgtcatcgcccagctacgctcagtggagatggtgagcaggccattattgataacggaagcatcacccaggtttttctgctcgttgacgctgagcgcgctgcctgtatcaatgttgaattgccccacaaagcggctattatcgccatccaactctacatctgtcctggcggttgcgctcacgatacccttcccgcttatgctattacgcagttcgccagtcacgttttttagcgttaacagaccgtcattggcaatatttcctctgcctaacccctgagtattatcgaggctgacttccgcatttgggctaatgctggttaacgcattgtagcgtgcattaagcccctcgatagccagcgttccccctgtaacattcaggtttccgccacctgtcagttcaccctgactgatcccacctttatttaccgtcagcgccccctctttgaacaaaacagtcgaacccatctgcccggtgaatgtctctaccgtctgcgtcgatccattaagatcgacgatggccgcgttgctgatgttcagttcccgggtgttgccaagtgcaccatccgcatcggtacgtaatgtccccatctgaacgtaggttgccccctgatagtcgttctgaccgttggaaagcgaaacctgtcgcaccgtattgattgccagatccccttcaccaccgatttttgccgacatatcggccgttgcgccataggctccgccatgttcggctaacgtcagcttttgcccaccatggatgttcagcgctttcagcccatagttaacgtacaaaccattacctggtgcggtcgtgaggcggaatccataatcaccctcggcgaccaccgttccgttttgcgcaatgtgtaacgttttgtccgcttccacctcgtcgccctgtaaatcacgtaacgttaatgagccacccgacccaataaccgtttgcgccttcaccagttgaacgccgacatggctatcgtcgtgttccagcaaattgagcgtcgtcagagggttattcgccatgggatcattccacggtttaggcacgtcgataagcacgtcgcccgtcccgtttacctgatagttacggcctttccaggtgtagtcacccgcgccgacaaccagcgtatcgacgctgatatatccctccgcgagcgtcgcagcaggaatatccgtatcgaaaatgatggtacctccattcatggccagtccaccaatggattgctctccaacttttaccgatgtggtattttcactgtcagactgcaacatcgcgtgagtaagcgcagcggtgttgtcgcgttccagagtgaaggtactgtctttcagttgggcaacaccggcgaattcagtccctgttgcatgggtaaagccaaacatcttgtcggaggatgacagctgcactcgcatcaagccatcgcctttgagcgcattggtcagcgtgtaatctcctgcactgttcgttgatgcgagaatgtcgagcgtaccggggtttgcaatggttacttcactcgaccccatgcccgttaccccatctgccgtatgagacgcaatggtcaggaggccgtcattgaccagcgttttaccgctataagtattccctgcattgaacaccgtatggcctgcatcatggatcacttttccgtctttatcgtcacctgtaatcagcatatcgacctggtagccggcatcactgttattggtatgattaaagacaaaaacgccttcgccaagaccaaactccactttcgtcgcattggtgataaatccggcatctgccgccgcctcaccgtgagcagcaccaatgtttagcgttcctacagcaggctcaaaaacacctaagtaaacttctccaccttcgacattcagcgtaccgttattcgtcagggttaacgtacccgtaccagatgtccctacgtacatattgaatgtttcaagaagagagttctgcccatccaccctcacgtcgcccttacttttgtcattgagagctatctgtgtatcacgcgctttaactatacctccggtggtaatattcagttcacccgtgcctaatacaccgacctgtagcaattgtgcgttagtagatgatgtctttaaattccagagactgtccgttgaaatattaactatccccttaccggaggcatttcctccgataaatccatagcccgttgaattaagggtggcaccattactgacatttacgataccgctaccaaaattaccgacattgatacccacagtatcgaacgatgatgtcgcatccatcaggttcagtgtgccgataccgcttgctttatcgcccaaaaaagtaatattttgcgatacgaacttaccgccatcgctaatattgaggtttccgacgcccgcaacaccaatggtggtatagacattcttattgacctcccacattccccccgtggtgatgctgacattcccgacgccggtttctccataaccgagtgaacttcctccgttgctgacaacaagcccctgattactgatattcatttcgccgtggccgtcataaccaagattagttccgagattagtgataacggagttcttatccttaacagtaatgttgcctgtgcctgtttctttcatccccgcagtgataattcccgaatctactttgccttcactcgagacattaagttcaccgtcgccagcatcaccgatatagatatagcggaaagcttcgcccgttccgaggaaattccaatgccctttatcggtcacgttgacgacaccgtgggaaccgtcctgaacgcccaccaatgaatattctttgttattaatcagtccattattggaaatattgactgtgccattaccgaaatatccattatagagtctgcgtaccgtgatgacagagtcttgatcctgcacattcagggttccgataccggtggcattgccaccgataatcgtattttcagccgtaaccaaccccccctcgcgaatagtcgcctccccagttccttgattaccaatttgaaattcaattgaggaatcattattttttattagccactcgccacccttttcaacgacaacctggccattactgcccgcctgatagcctaaaatggcgacgattgaactcgtgacgtaacccttatccgtaatatttaatgaacctgtgccatagctacctatttcgaataattcggtcgtcagaacagagtcctctccctcaacattgaccgtcccgacgcctcctgtcgaagaacctaatcttaaatagcctccatcgacgtgacccttctgtttaatattcagcgtccccgttccggattgacccacatttaaaggccttgcattatttccgctatcatacaatcgccaggtgccacccaaaacattaacggtgccctctgagtcctcattagcgccaatgacgctggtagtaatagtggttaaggaggcattaccgccagccaaaatattaagcactccagtgccataccagccaaccaggtaggcatcataagcaacatcagtatcaatattggtaatctgatcattatcaacttccagacttgcaccagacgctgaaccgcttagtgccagcaaaacacccagcgtcaatctactgaatttcgttgtcagtccagaggatttacgcaaattaaccgtcgatgttttacctgccctgcgagttaattccgagcaggcctgaaatacctgtagagtgcaattccatatcacgcgatagattctattcatataaacgctccatatacaaacaatacagccacgaaagagatgagtcgtcagacattaaaaatgaaacttattaaattgtcagaggtctgtattgagtgttagttggaggtgggaaggtgtcaatttggctaatttgctaatgctttcgaattgatagattaaaaattgcatagttcttattttatttaaatatgaactatgagttattgttgcttaataagaaaactgtttctttcaataggaaaattatcatcatcatatttaacaaagaatagcactaattgctaaaaatcgaagtttattaaaccccttttgcatccattagtgtctttaggaatattcgctataaaataagggttgtgcttaatgctttaagaaaaatagcaattttcccttgaatatcgtactggtgatggaacgatgaatctgcaagctggcttttaacaagccagctctaaaagaagggaaataagaataactatactcaaaaactaacagccacggtcatcatgatgtggctgtcaatgaaactataacccaggcgctttccataacgacgtcgtcagtccatgatcaaccagccccagctgatcctgataaactgcctgccacttatcgcgtgaatcctgataaagttcatgcttttccgggtctggtgtgtgcgtccgttcccagcgaaccaggcgttctccggtttctgccattgatgaaaaaattccggcaccgacgccagctgcaatggcacatcctaatgcagtggcttctttgaccaccggaatattgacgggtaatcccgagacatcagcgagaatttgactccataatttcccttttgaacctccgcctgcaaagactaacgatgaaggatgaatattcgagaaatcagcaatttgctgcaagttacacgctgatacaatcgccgcattttcttccagcgcacggaacaatgtcgctttgttacatttatccgggtcaatggacaagttaataaaggaaggcgcagcgtgataccaggttttaaagcgcattctgtcggagaagatcggcattacgccccacgacccaggcggcacccgactggccatctcttccagcagcgtataggtgtcgatgcctaaacgttcggcaatcagtttttcttcggcacagaaagcatcgcggaaccagcgcatggtgagtccggtaaaaaagcttatagattcagcttgtaccatgccaggaataacatgaggattaacgcgcacgttcatttctgggtctgtcaccggcgcggctaaatttacaacttgctgccagaatgtgccgccaagaaccgcggtttgtgccggacgcacaacgcctaacccaaggcaaccaagctgcacgtcgcctcctccaacgaccaccggagtgcccgccttcagaccgcagagttccgccgcttgtgaacttaccacgcccagcaatgtgccggtttctttgacaggagaaagaatatcggcacgtaggccagccatatccagcaatgcaggtttccagtcacgggtggttagatcaagaagtcccgtggtgccagcgttagagggatccaccgccagttcgccgctgagcatataggccagccagtcgctgatcatggtgatggttgatgcctgacggtaaatatcggaacgatggtgcgccagccaaagtaatctggggatggcacttaaagccagtgtttgtccggtcgcgcgataaacttcgttttcaaaggtattgttgtgcagttctttaagttcgctaacttcgcgtgccgctctggcatccacattggcgcaggcccagatcggggctccttcattattatataaaacaatgccttcacgcatcgaacatgccgaaacggcagcgatatactccggggctatgccggcgttgtgcagcgcctggcgcatacactcacacgccagttgccagtttttgttgagatcaaattccatagaaccaggaacgtccggtactgccagatgccgccactccgcctgtcccactgctatttgattgccttccaggtcgaatatcacagcccgaatacttccggtgcctgcatccagcgccatcaggtagtactttgattctgaaagggtaaagagtcgagccattagattatcctcggcttatgcgttctgtctgttcctctatacgttctccatcattcccggtaataaggtcatgcaaatttaactacgtaaaatcgccgctgctgtgtcctgatcggtaaccagtgcgttgatataaccgcctttcattgcagcggcaattgcttcggctttattttctccccctgccacgccaacccggacgggtatggtcttcagcgcgcttaaaggtaagccaatcagttcgttatgtattttgatattcgtgacaacgtcaccttttgcatcaaaaaagtagcctaaaatgtcgccaaccgccccttttcggccaatcattaactgttcgccctggctgatataaccggagcgaatgattgtcgcatcgtcctgttgactcacagcaccaatgccgacaatcgccacatccgctgcttgcgcggctaacagaacatctttgacgcaattttcattttttagcgtacgggcaatgtcagcggaggatgcccgcaacggagccggaataatattcacactgcacgccgcgttaagctgcccgattcccgtcatataagaaccgacgccaccggagagcgtgaccaggcgaatttgctgtgacgaaataaaaccacttaagcgttgcagcgtattcatggttgcctcgccaaaaccaatcgccagcatctgttgtggttgaagtaaactcatcaacatatgcgccgcgcctatccccagtcgcccaccgacatcagcatccgcaagcccagggatcacccggacatgttgcagcgaaaactgacgacgtaattgagtttcatattccagacagccttcaaagcgagaattaatctgtacgcgaataatgccggactgatgccctttctccagcaatcgcgacactttcaaacgtgtcaggccgagacgatcgctgatctcgctctgggtcagcccgtcgtgatagtaaaaccacgcgatccgcgcgacctgttcttcttcacacattccctgttctgaaattgccgaatcgttgattgtcataattcattcttcactttgaacatatttaaatctttaatgcaattgttcagttcttgctcatttatatctgtgatggcaaccacagtttgactctacgagcatgaacaaacgcaaccgtgaaaatcaaaatagcataaattgtgatctattcgtcggaaatatgtgcaatgtccacctaaggttatgaacaaattaaaagcagaaatacatttgttcaaaactcacctgcaaaactgaacgggggaaatatgcaaacgagtgatacccgcgcgttaccgctactttgcgcccgctcggtttataaacagtattcaggggtcaatgtcctgaaaggcatcgattttacgttgcatcagggggaggtccacgccctgctcggcggcaatggtgccggtaaatcgacgttaatgaagattattgccggtattacccctgctgatagcggtacgctggagattgagggcaacaactacgtcagattaacgccagttcatgctcatcagctgggtatttatctcgttccccaggaaccgctgcttttcccaagcctgtcgataaaagaaaacatcctgtttgggctggcaaaaaaacagctctccatgcagaaaatgaagaacttgctggcggcgctgggctgccagtttgatctgcatagtctggcaggatcgctggatgtcgccgatcgccaaatggtggaaatcctccgcgggctgatgcgcgactcgcggattctgatcctcgatgaacctaccgcctcgcttacccctgcggaaaccgaacgcttgtttagtcgcttgcaagagctgcttgctactggcgtgggtattgtttttatctcgcataagctgccggaaattcgccagattgccgatcgaattagcgtgatgcgcgacggaaccatcgccttaagcggcaaaaccagcgaactgtctaccgacgacattattcaggccatcaccccagcggtacgggaaaaatcgctctctgccagccaaaaattatggctggagttacctggtaaccgcccacaacatgccgccggaacgccggtgctgacactggaaaatctgaccggcgaaggtttcaggaatgtcagcctgacgctcaatgccggagaaattctgggcctggctgggctggtgggggccggacgcacagaactggccgagacgctctatggtctgcgtactttgcgtggcggacgcattatgctgaatggtaaagagatcaataaattatccactggagaacgtttactgcgcggtctggtttatctgccggaagatcgccagtcatccggactgaatctcgatgcttcgctggcctggaacgtctgcgcccttactcataaccttcgtggattctgggcgaaaaccgcgaaagataatgccaccctggaacgttatcgtcgggcgctgaatattaaattcaaccaaccggaacaagctgcacggacattatccggtggcaaccagcaaaaaatcctcattgccaaatgcttggaagcttcgccgcaagtattgattgtcgatgagccgacgcgcggcgtggatgtctcggcccgtaatgatatctaccagctgttgcgcagcatcgccgcacaaaatgtggctgtgctgcttatctcctccgacctggaagagatcgaactgatggcagatcgtgtgtatgtgatgcatcagggcgaaattacccactctgcactgaccgagcgcgatattaatgtcgagactattatgcgcgttgccttcggcgatagtcagcgtcaggaggcgtcatgctgaagtttattcagaacaaccgtgaaatcacggcactgctggcggtggtgctgctgtttgtattacccggttttctcgaccgccagtatttaagtgtgcaaacgctgaccatggtttatagcagcgcgcaaatcctgatcctgctggcaatgggcgcgacgctggtaatgcttacgcgcaatattgatgtttcagtgggttcgattaccggaatgtgcgcggtgctgttggggatgttactgaacgcaggatattcactacctgttgcttgtgtcgcgactttactgcttggtttgctcgcgggatttttcaacggtgtcctggtcgcgtggctaaagatccctgccattgttgccacccttggcacgttagggttgtacagaggcatcatgttgctgtggactggcggcaaatggattgaagggttacccgccgaactgaaacagctctccgccccgctgctgcttggcgtttcagcaattggttggttgacgataattctggtggcatttatggcctggctgctggcaaagacggcgtttggacgcagtttttatgccacgggcgataatttacagggcgctcgtcaactgggcgttcgtactgaagccattcgcattgtggcattttcgttgaacggctgcatggcggcactggcgggaattgtgtttgcttcgcagattggttttatccccaaccagaccggtaccgggctggagatgaaagcaattgcagcctgcgtgctgggcggcattagtttgctcggtggttccggtgcgatcattggtgcggtactcggcgcatggttcctgacgcagatcgatagcgtactggtgctgttgcgcattccggcatggtggaatgattttatcgcgggtctggttctgctggcggtgctggtgtttgatggacgcctgcgttgtgcgctggaacgtaatctacggcggcaaaaatatgcccgctttatgacgccaccgccatccgttaaacccgcttcgtcaggtaaaaaacgggaggccgcataatgcgtattcgctacggttgggaactggctcttgccgcactgctcgttattgagattgtcgcatttggtgcaattaacccgcgaatgttagatctcaatatgttgctgttcagcaccagtgactttatctgcattggcattgtcgccctaccgctaacgatggtgattgtcagtggcgggatcgatatttcgtttggttcgaccatcggcctctgcgccattgcattgggcgtactgtttcaaagtggtgtgccgatgccgctggcgatactcctgaccttactgctcggcgcattgtgcgggctgatcaacgccggattaattatctataccaaagttaacccgctggtgattacgcttggcacgctgtatctgtttgccggaagcgctctgctgctttccggtatggccggagcgacggggtacgaaggtattggtggattcccgatggcgtttacagatttcgctaacctggatgtgctgggactccccgttccgctgattatcttcctgatatgtctcctcgttttctggctctggctgcataaaacccatgccggacgtaatgtgtttttgattgggcaaagcccgcgcgtggcgctttatagcgcgattccagttaaccgtaccttatgtgcgctctatgccatgacggggctggcgtctgcggtcgccgctgtgctgctggtatcgtattttggttcagcacgttccgatctcggtgcgtcgtttctgatgcccgccatcaccgccgtggtgcttggcggggccaatatttatggtggttccggttccattatcggcaccgccattgcggttttattagtgggatatttgcaacaaggtttgcaaatggcaggagtgccaaatcaggtgtccagcgccctttccggtgcgctacttatcgtcgttgtcgtaggtcgttccgttagcctgcatcgccagcaaattaaagagtggctggcgcgtcgggccaataacccattgccataaaggatatcttcatgacacttcatcgctttaagaaaatcgccttacttagcgctcttggcattgccgcaatctctatgaatgtgcaggccgcagagcgtattgcatttattcccaaactggttggcgtgggattttttaccagcggtggcaacggcgcacaacaagcgggtaaagagctgggcgttgatgtgacctacgacgggccgacagaacccagtgtttctggtcaggtacagttgattaataacttcgtcaatcaaggttataacgccattatcgtttctgcggtttcgcctgatggcttgtgtccggcactgaaacgcgccatgcaacgtggtgtgagagtgctgacctgggactctgatactaaaccggagtgccgctcttactacattaatcagggaacgcccgcccagttaggaggtatgttggtggatatggcggcgcgtcaggtgaataaagacaaagccaaagtcgcgtttttctactcaagccccaccgttacggaccaaaaccagtgggtgaaagaagcgaaagcgaaaatcgccaaagagcatccaggctgggaaattgtcactacgcagtttggctataacgatgccactaaatcgttacaaaccgcagaaggaatattaaaagcgtatagcgatctcgacgccattatcgcccccgatgccaacgccctgcccgctgccgcacaagccgcagaaaacttgaaaaatgacaaagtagcgattgtcggattcagtacgccaaatgtgatgcgcccgtatgtagagcgcggcacggtgaaagaatttggcctgtgggatgtggttcagcaaggcaaaatttcagtgtatgtcgcggatgcattattgaaaaaaggatcaatgaaaacgggcgacaagctggatatcaagggcgtaggtcaggttgaagtctcgccaaacagcgttcagggctatgactacgaagcggatggtaatggcatcgtactgttaccggagcgcgtgatattcaacaaagagaatatcggcaaatacgatttctgatgtgcattacttaaccggagtaagttatggcagatttagacgatattaaagatggtaaagattttcgtaccgatcaaccgcaaaaaaatatcccttttaccctgaaaggttgcggtgcgctggattggggaatgcagtcacgcttatcgcggatatttaatccgaaaacgggtaaaaccgtgatgctggcttttgaccatggttattttcagggaccgactaccggacttgaacgcattgatataaatatcgccccgctgtttgaacatgccgatgtattaatgtgtacgcgcggcattttgcgcagcgtagttccccctgcgaccaataggccggtggtactgcgggcgtcaggtgcgaactctattctggcggaattaagtaatgaagccgtggcgttatcgatggatgacgccgtgcgcctgaacagttgcgcggtggcggcgcaggtttatatcggcagcgaatatgaacatcagtcgatcaaaaatattattcagctggttgatgccggaatgaaagtgggaatgccgaccatggccgtgactggcgtgggcaaagatatggtgcgcgatcagcgttatttctcgctcgcgactcgaatcgccgctgaaatgggggcgcaaattatcaaaacctattatgtcgaaaaaggttttgaacggattgttgccggatgtccggtacccattgttattgctggcggtaaaaaattaccggagcgcgaggcgctggaaatgtgctggcaggctatcgatcagggcgcttctggtgtggatatggggcgtaatattttccagtctgaccatccggtggcgatgatgaaagccgtacaggcggtggttcaccataacgaaacggctgatcgggcatatgaactctatctgagtgaaaaacagtaactgcggatctaaggagaagaattatgcacgtcacactggttgaaattaacgttcatgaagacaaggttgacgagtttatcgaagtttttcgccagaaccacctgggctctgtacaggaagaaggcaatttgcgcttcgatgtcttacaggacccggaagtgaattcgcgcttttatatctacgaagcctataaagatgaagacgcagtggcgttccataaaaccacgccccactacaaaacctgtgtcgcgaaactggaatctttaatgaccgggccgcgtaaaaaacgtctgttcaatggtttgatgccgtgaggcgaatttatcaattttatctacaattggggtaacgcgctgacgggagtaaaaaaatgtctgactggaacccctctttatatctacacttttccgctgaacgatcgcgtccggcggtggagctgcttgccagagtgccgctggaaaatgtcgaatatgttgccgatcttggctgtggcccaggtaacagcaccgcccttctacaacaacgttggcctgcggccaggataacaggcatcgactcgtctccggcgatgattgctgaagcgcgcagtgctttgccagactgccagttcgtggaagcagacatccgcaactggcaaccggtacaggcactcgatctgatttttgctaatgcctcactgcaatggctgcccgaccactacgaattgtttcctcatctggtttctttacttaatccgcagggcgtgctggcagtacagatgccagataactggctggagccgacccatgtgctcatgcgcgaagttgcctgggaacaaaactacccggatcgcgggcgtgagccgttggctggcgttcatgcttactacgatattttgagcgaagccggatgtgaggtcgatatctggcgaaccacctactatcaccagatgccgtcacaccaggcgattatcgattgggtgactgccactggattacgtccgtggttacaggatctgaccgagagcgaacagcagctttttcttaagcgctaccatcagatgctggaagagcagtatccactgcaagagaacggacagatactgctggcatttccgcgtctgtttattgttgcccggcgtatggagtaaatatcacgtcagctggtaatgacgatcgggaagaatttttgctggaatttcggcttcatcgttcatctgtaacaggtcaatttcaatagcgttgcagatggcatccagtggtaaatcattgttttcagtaccgaacggatcttccagttcttccgccagacaatccagcgaaataaaagtgtaggaaatcagcacagagataaaaggcgtcatgtaatgcaggtccacgaccagcgcgaacggcagcatgatacaaaacagataaacggtacgatgcaaaatcagggtgtaggcaaagggaattggcgtataggcaatgcgctcgcatcctgccaggaccgctgaaatatcattaagccgatcgttgaggctaataaacaggatatctgaaagctgtccattgcggcgctgaaccgccaaccattctcccattattaacaagatacggttagctggagagttcgaagccagtacacgctgaagatcttcagtcttgagataatgagccagcacttccgcctgtggctgtttgcgtaatgtcatgcgtaaacagtgggcgaaagcgatttgcagccgggcaaactcccttacacttgccgaatccggcaatgtcgtttttacctcgcgcagtaacgaccgtgaggcaatcatcaactgcccccaaagttttcgcgcttcaacgtaacgggcgtacccggcattattacgaaaaccaagaaaaatggcgatggcgacaccgagaatgctgaacggtgcgagggtgaatttgatgcccagatgcgtgtaccagggcagcatgaaaataacagcgatagaaaagagaaaattgagtagtaagcgcgaggatatcttggataatactgagccgtgccagacaaaaatacggcgcagccagtgttgttgtggacgaacaatcatggttatcttcaggcgtggaaaagtcgccctattaaacgtgattacgatcacattctcaagacgctacttacaaattacctacaagcttacaacattagcaggcgctgcatgtggcacctgttaatgataaaggcatataggatgttgtaactaatatggtgaaataagaaacccggtcgaaaccgggttcagaagtaacggtgttattagcacaacggacgtacagcttcgcgcatccctttttcgagaatcgcatccaggtcattagcaacctgctcgaccagaccaggcacttgcgtcaggtcctgctcccagtggtctttttctgccaaaacaatcgctaccagttcctgggtgccgataacacggtcacgatgctggctccagagttgctgataacgttccagccagtgtgcatcgtcctgtaccggatatgtttcgccgttacgctcaccacgatagaacgcaatcaatgccgctaatgcgaaagtaaggcgcgccggaagtgtgccgtttgccttctgccctgccagcagctgtggcaggatgcgggtgcggaacttggtcataccgttgagcgcgatagacagcagctgatgcttaatgtacgggttacggaaacgcccggtgactgcactggcgaaagattccagttcatcacgaggcaaatccagtaccggaataatttcttcgtagatagctttttcaacgaatgcgcaaatttcagcatcgttcatcgcttcacctacggtatccagccctgcctggaacgccaccggcaccagcgcggtgtgcgcaccgttgaggattgccactttgcgttctttgtacggtttaatatcgtcaacaatcagcacgttgagcggatatttgtccagacgcagttcagtcgctaaggatttcggtccctgaatcacaaacaggtaaaagtgttcagcggtgtcgagaaaaccatcgtgataacccagttcttcttccagtttagccacttcatcgcgcggataaccggtaacgatacggtccaccagcgtagaacagaagctgttagcctgatccagccattgaataaatgcttctggcagtgcccactcttgcgcatagcgcagcaccagttcacgcaacgcgtcgccattgtagtcaatcaactcacacggaatgatgatccaacctttatccagcgcaccgttgaaatggctaaagcgttcgaacagcagacgggtcagttttgccggatagcttaccgctggcgcgtcatcgaatttatcgcccgcatggtagctgatacccgcttcggtggtgttagagaaaacaaagcgcatttccgggttgtgcgccagtttcaggaattcatcgtattcactgtagacgctgatttcacgattaaccgagcgaatcagacgcgcgtcgctgaccgcttcccccttctcattcaggccacggataatggtggtgtacagaccatcctgcgtgctcagtgacggcgggaatgaagtttcaatcggacgaacaacgaccacgccagaattcagatcggtgtgctcattcaggagatcgatttgccagtcaacaaaggcgcgcaggaagttaccttcaccaaactgaatgatacgttctggatactgtgcaccgggaaaatcgcgacgatttagtgttttcacaatgggttcccttctgattagtcatacaacctgtttgaattggtacgacaggttagcaaactttaatacgccgaacccctgttttgatcaactcctgatgattaatgagcagttttatgagaaaagtgtggcgcggatcatggtttaatcgaggaaaaacgccttttcctggatcataaagtggtagaacacattgcattcaaatcgcgcgtaatgaataaagatgtcagacaacttcctcaccgtaacgcatagtgctggtacggttgcgcccatctttcttcgagcgatacagacacgtatcggcttcgaccatcaatttattaaagtcatcggtcagcgttaggtacgatgcgcgaccactaccgacgccaatacttaccgtgagataaagcgttttttgttgccaggtgaatggttgcagttcaacgcctttacggattttttccgccattagcagaccatcgacaggattcaccgacggcactgcaacagcaaattcttcgccgcccattcgcgccaccagccccttatcaccgacaatcttctgaatatgccgggcaaacacgcttaacactttatcgccacattcatgtccatagttatcgttaatgcttttgaaatagtcgatatcaagcagcatgacagtcagatgttgtgtctgtttcagcgatggacttttcagcgcctcataaagaccggaccgtgagtaaacctgagtcagaaaatcaaagtcggctcgcagcgcaacttgcttcattagcgaattgatcgctgccacgctaaaagaaaccataattgggcatatcgccatcgtggcaataccgagacgtgcggagaacatttgcggaatggagaacggcgaaccgaccgagatatcaatcaccgaatttgccaccagtacgatttccaccgcaccggtgacaaaggtcaacagacatgttacctgcggcgtatagcgcactgcacaccagattaatgcaggcagcgggaacgccagactccccgctccgccaatgactaccgaggcaataaccgacacaataagcgcgatggcgggcatcatctgttctgctttaaagcgcggcagcactccaggaatagccaacgtcagcatacaaggcacgatcaacacgcccgttgagaattgctcactgaaccagtccgcaagcaaaggccagaaatccagactatcaatactgaccgaaccaagatagcatgttcgctgacagcggcggcaaataaaggtaccctgggaatgctattttgtcgttttccgcaattctcatggctgattcatctgtacaaccagccagtgatagattaccgccacgatataacgttgttgttcttcgcttaacgaaacaccctgcggaatgttatgccacttagccagacaaccgcgacagcaggtcgcggtggcgtgctgagcgataaacaccggatgcccgcgcatgggggtttgcttaccgtcattagccggtaatgccggagcaagacgtttagcgacaaaatccgccgcatgttgttcgatgactggcgcgcctttctccaggcaatactgacgctctttcatgcccagacgaaagcgagagcgaaattttgaacgggataaacgcgcgaagagtggatcgagagactgcattaataaaccgaacgccctaactgtttcgtcaattgttcaagaacggcaatacccgcaagcgagttacctgcatcatccagttccggactccagacagcgatggccatttcatgcggaacaatcgccacaataccgccaccaacgccagatttcgccggtagccccacccgccaggcaaactcccccgcgttctggtacataccactggtcgccatcagcgcgttaatttgccgcgcctgcattggcgtcaccactggttcatcaatatgaatagctttcccctgattagccagaaagacaaacgtccgggccagctctacacagctcattttcagagcgcagtaatgaaagtagttttgcagaacggttgtcacgtcatgatggaaattgccaaacgacttcatcagccaggcgatagccgcatttcgcgcggaatgttcaaattcggaacgcgctaccaccgtatcgtaggaaatatcagacacaccgcttaagccgcgcacgacttccagcatacgttgccgtggtgcgcttaatcgcccttgcaacatatcgcagaccaccagcgcaccggcattaatgaacggattacgcggtataccctgctccatttccagttgcactaaggaattgaacggtgatccagacggatctttgccgacgcgttgccagatttcctcttcggagtaatgacgcatggcgacaacgagactcagcactttggaaatagactgaatggaaaaacgttcttgcgcgtctccggcctgaaaaagctgtccgtcaacggtacagatagcaatccccaatcgggaaccgtctactgtagccagcgccggaatataatccgcgactttaccctgaccaatgagcggccgcacttgccgcaagatgttttctaaaattgcattatccatggcgactgccactttctactcctggaccgcaggtctgaaaagacctgcgagtatatcagagctgaatatgtcgcgtcagatccggtctttccacaccgtctggatattacagaattcgtgtaagccgaaatgggaaagctcacgaccaaagccactctttttcacgccaccaaaggccactcgcgcgtcgctggcacaataaccattgataaacaccccaccgcattccagacgtgccgccatctgtctggcctgtgtttcgtcagtggtaaaaatggtcgctgaaaggccgaactcactatcattagccagttccagtgcatgttctgcatctttcgcaatggtgattgccgcaacggggccaaacatttcttcccgaaacgcggtcatttctggggtaacattcgccagaaccgttggcggatagtagttacctgccccagccatcttttccccgcccagtaacaaacgcgcaccctgcgccagggttttctccacctgatgatgcagctcatcacgtaaatcaaaacgagccattggtccgagagcgttctcttcgtcacggggatcgcccattttcaaggctgccgcagctgccacaaaacgttcggtaaatgccgaagcaattccctcttcgataataaagcgttttgccgctgcacatacctgtccggtattctgataacgtccggctaccgccgctttcaccgccagttccagatcggcatcgttaagcacaataaacggatccgaaccgcccagttccagtacgcattttttcagtgccgctccagcctgtgcgccaatagccgctcccgcacgaacacttccggtcaccgtgacagcagcaatgcgcgagtctttaatcatctgactgacaccgtcgttgtcggcattcagccagccatatacgccttgtgggatacccgcatctttaaacacctgggcaatgagctgtgcacagcccatcacattcggcgcatgtttaagtaagtagccgttacctgcaagaatgatgggaacagcgccacgcatcacctgccataacggaaaattccacggcataatcgccagaatcgtccccaacggtcgatactcaataaccgcctgctgattttccaccagcgtaggttccgccttcagcattgccggaccatgttctgcataccagtcacacaaattcgccgatttcgccacttcagcgcgcgcctggttgattggtttgcccatttcgcgggtgatcatttgcgccatttcttcgctacgagcgcgcagagccttaccgatatcacgcagtttttcagcacgataatctatatttgtctcgcgccagtcgcgaaagcctgctgccgccagctgaagtgcgttttcgatatcgtcagcgccagcccacggcagcacagaaagttgttcacccgtggcaggatttatcgaaattgcatgagttgccggagtaatggtcatcggggtatctcctttatgagtcatggtatgaagatacgcagatttactcttgctttaaaatgaataatattaagccacttattcacgaatcgagaatgctatggatctgacccaactggagatgttcaacgcggttgccgaagctggcagcataacccaggctgcagcaaaagtgcatcgcgtgccgtcgaatctcactacccgtctgcgccagctggaaacagaactgggggttgatctgtttattcgcgagaatcagcgtttacgtctctctcctgccgggcataactttttacgctatagccaacaaattctcgcgttagtggatgaagcgcggagcgttgtcgctggcgatgagccgcaaggtttattttctcttggttcgctggaaagcaccgctgcagtgcgcattccagccacgctggcggaattcaaccgtcgttatcccaaaattcagttttcactttccaccggcccttccggcactatgctggatggtgtactggagggaaaactgaatgcggcgtttattgatggacccattaaccatactgccatcgacgggataccggtataccgcgaggaactgatgatcgtcacgccacaaggatatgcgccagtaacccgtgccagtcaggttaatggcagtaacatttatgccttccgcgccaattgttcgtatcgtcgccacttcgagagctggtttcatgctgacggtgccgctccgggaactatccatgagatggagtcttatcacggaatgttggcctgtgtgatcgcaggagcaggcattgcgcttattccgcgctctatgctggaaagtatgccggggcatcaccaggttgaagcgtggccgttagctgagcaatggcgttggttaacaacctggctggtctggcgtcgtggtgcgaaaacacgtccgctcgaggcatttattcaactgctggatgtgcctgactcggcaagacagggatatcaatgagctatttttgatagttcttgcggttaatatgctctatatagtgatgttccgatgacttatgactatatggggcaaatatggttacgccagtaagcatcagcaattacatatctcttcctgatgattttcccgtacgtaatattgcaccgcaggtaaaagaagttttaaaggattttattgatgcacttagtacaataatatgtaatgaagagtggcgcacgtctttaaacatcaactcagccacaaaaaagatatttaataaccttgacaacttatcatatattcagaggacttcttttcggggtaacgacacgctatacaatgaaaaggttcagtttaaactcacttatcccgccaggaatggaagacacaaagaaaatattgaatttcaggtagtaataaatttaagccctatttatttagataattttcgccatgatggagaaattaatattttttgcgctcccaacccaaagcctgtcactatggggcgcgtatttcagaccggcgtcgagcgtgtactctttctgtttctgaatgattttattgaacaatttccaatgatcaaccctggtgttcccatcaaaagagcgcatacaccacatattgaacccctgccttcggatcaccataccgctgcagattacttacgccagtttgatttgcttgtcctgaattttatctctcgcggtaattttgtcatactcccccgattatggaataactctgaggttcacagatggttcgtcaataaagatcctaacttgatcaccgccattctcgacataacggacagcgaattaaaagaggatttgttgcaaagcctgatggattcattaggttctaacaaacatgtactacccgaagtctgcatctgctttttatcccttttagcagaacaagaatctcctcattttcagaacttgtttttatttttcgccaatatgttattgcactatcaccaatttatgaatcccaatgaaagtgatttgaatgacgtgttgatgccagcatcattaagtgatgataaaattatcaaacatatggcgcgcaggaccctcaaactgtttgtaaaaaatgaaacaccgccaaaagttactcacgaagacctggtgaaaaacaggcctcgctcccctgtcagaccacctatacccgcaaccgccaaaacgccagacctccctgaacgtcattaaaccgtgatgttaccgactctctgacgcgtgaaagaatcagcgtcagagaaacggaaaacgcgatccagatcacaaatgcattgtattcacatcattaaccgttttaagatcatttcatcactttttcgcaactcacccgataatctgttatgacaacaaacactgtttcccgcaaagtggcgtggctacgggtcgttacgctggcagtcgccgccttcatcttcaacaccaccgaatttgtccctgttggcctgctctctgacattgcgcaaagttttcacatgcaaaccgctcaggtcggcatcatgttgaccatttacgcatgggtagtagcgctaatgtcattgccttttatgttaatgaccagtcaggttgaacggcgcaaattactgatctgcctgtttgtggtgtttattgccagccacgtactgtcgtttttgtcgtggagctttaccgttctggtgatcagtcgcattggtgtggcttttgcacatgcgattttctggtcgattacggcgtctctggcgatccgtatggctccggccgggaagcgagcacaggcattgagtttaattgccaccggtacagcactggcgatggtcttaggtttacctctcgggcgcattgtgggccagtatttcggttggcgaatgaccttcttcgcgattggtattggggcgcttatcacccttttgtgcctgattaagttacttcccttactgcccagtgagcattccggttcactgaaaagcctcccgctattgttccgccgcccggcattgatgagcatttatttgttaactgtggtggttgtcaccgcccattacacggcatacagctatatcgagccttttgtacaaaacattgcgggattcagcgccaactttgccacggcattactgttattactcggtggtgcgggcattattggcagcgtgattttcggtaaactgggtaatcagtatgcgtctgcgttggtgagtacggcgattgcgctgttgctggtgtgcctggcattgctgttacctgcggcgaacagtgaaatacacctcggggtgctgagtattttctgggggatcgcgatgatgatcatcgggcttggtatgcaggttaaagtgctggcgctggcaccagatgctaccgacgtcgcgatggcgctattctccggcatatttaatattggaatcggggcgggtgcgttggtaggtaatcaggtgagtttgcactggtcaatgtcgatgattggttatgtgggcgcggtgcctgcttttgccgcgttaatttggtcaatcattatatttcgccgctggccagtgacactcgaagaacagacgcaatagttgaaaggcccattcgggccttttttaatggtacgttttaatgatttccaggatgccgttaataataaactgcacacccatacataccagcaggaatcccatcagacgggagatcgcttcaatgccacccttgcccaccagccgcataattgcgccggagctgcgtaggcttccccacaaaataaccgccaccaggaaaaagatcagcggcggcgcaaccatcagtacccaatcagcgaaggttgaactctgacgcactgtggacgccgagctaataatcatcgctatggttcccggaccggcagtacttggcattgccagcggcacaaaggcaatattggcactgggttcatcttccagctcttccgacttgcttttcgcctccggtgaatcaatcgctttctgttgcggaaagagcatccgaaaaccgataaacgcgacgattaagccgcctgcaattcgcagaccgggaatcgaaatgccaaatgtatccatcaccagttgcccggcgtaatacgccaccatcatgatggcaaatacgtacaccgaggccatcaacgactgacgattacgttcggcactgttcatgttgcctgccaggccaagaaataacgcgacagttgttaatgggttagctaacggcagcaacaccaccagccccaggccaattgctttaaacaaatctaacattggtggttgttatcctgtgtatctgggttatcagcgaaaagtataaggggtaaacaaggataaagtgtcactctttagctagccttgcatcgcattgaacaaaacttgaaccgatttagcaaaacgtggcatcggtcaattcattcatttgacttatacttgcctgggcaatattatcccctgcaactaattacttgccagggcaactaatgtgaaaagtaccagcgatctgttcaatgaaattattccattgggtcgcttaatccatatggttaatcagaagaaagatcgcctgcttaacgagtatctgtctccgctggatattaccgcggcacagtttaaggtgctctgctctatccgctgcgcggcgtgtattactccggttgaactgaaaaaggtattgtcggtcgacctgggagcactgacccgtatgctggatcgcctggtctgtaaaggctgggtggaaaggttgccgaacccgaatgacaagcgcggcgtactggtaaaacttaccaccggcggcgcggcaatatgtgaacaatgccatcaattagttggccaggacctgcaccaagaattaacaaaaaacctgacggcggacgaagtggcaacacttgagtatttgcttaagaaagtcctgccgtaaacaaaaaagaggtatgacgatgtccagacgcaatactgacgctattaccattcatagcattttggactggatcgaggacaacctggaatcgccactgtcactggagaaagtgtcagagcgttcgggttactccaaatggcacctgcaacggatgtttaaaaaagaaaccggtcattcattaggccaatacatccgcagccgtaagatgacggaaatcgcgcaaaagctgaaggaaagtaacgagccgatactctatctggcagaacgatatggcttcgagtcgcaacaaactctgacccgaaccttcaaaaattactttgatgttccgccgcataaataccggatgaccaatatgcagggcgaatcgcgctttttacatccattaaatcattacaacagctagttgaaaacgtgacaacgtcactgaggcaatcatgaaaccactttcatccgcaatagcagctgcgcttattctcttttccgcgcagggcgttgcggaacaaaccacgcagccagttgttacttcttgtgccaatgtcgtggttgttcccccatcgcaggaacacccaccgtttgatttaaatcacatgggtactggcagtgataagtcggatgcgctcggcgtgccctattataatcaacacgctatgtagtttgttctggccccgacatctcggggcttattaacttcccacctttaccgctttacgccaccgcaagccaaatacattgatatacagcccggtcataatgagcaccgcacctaaaaattgcagacccgttaagcgttcatccaacaatagtgccgcacttgccagtcctactacgggcaccagtaacgataacggtgcaacccgccaggtttcatagcgtcccagtaacgtcccccagatcccataaccaacaattgtcgccacaaacgccagatacatcagagacaagatggtggtcatatcgatagtaaccagactgtgaatcatggttgcggaaccatcgagaatcagcgaggcaacaaagaagggaatgattgggattaaagcgctccagattaccagcgacatcaccgccggacgcgttgagtgcgacatgatctttttattgaagatgttgccacacgcccaactaaatgctgccgccagggtcaacataaagccgagcatcgccacatgctgaccgttcagactatcttcgattaacaccagtacgccaaaaatcgctaaggcgatccccgccaattgtttgccatgcagtcgctccccgaaagtaaacgcgccaagcatgatagtaaaaaacgcctgtgcctgtaacaccagcgaagccagtccagcaggcataccgaagttaatggcacaaaaaagaaaagcaaactgcgcaaaactgatggttaatccataccccagcagcaaattcagtggtactttcggtcgtgcgacaaaaaagatagccggaaaagcgaccagcataaagcgcaaaccggccagcatcagcggtggcatgttatgaagccccactttgatgaccacaaaatttagcccccatacgaccactaccagtagcgccaacaccccatcttttcgcgacattctaccgcctctgaatttcatcttttgtaagcaatcaacttagctgaatttacttttctttaacagttgattcgttagtcgccggttacgacggcattaatgcgcaaataagtcgctatacttcggatttttgccatgctatttctttacatctctaaaacaaaacataacgaaacgcactgccggacagacaaatgaacttatccctacgacgctctaccagcgcccttcttgcctcgtcgttgttattaaccatcggacgcggcgctacgctgccatttatgaccatttacttgagtcgccagtacagcctgagtgtcgatctaatcggttatgcgatgacaattgcgctcactattggcgtcgtttttagcctcggttttggtatcctggcggataagttcgacaagaaacgctatatgttactggcaattaccgccttcgccagcggttttattgccattactttagtgaataacgtgacgctggttgtgctcttttttgccctcattaactgcgcctattctgtttttgctaccgtgctgaaagcctggtttgccgacaatctttcgtccaccagcaaaacgaaaatcttctcaatcaactacaccatgctaaacattggctggaccatcggtccgccgctcggcacgctgttggtaatgcagagcatcaatctgcccttctggctggcagctatctgttccgcgtttcccatgcttttcattcaaatttgggtaaagcgcagcgagaaaatcatcgccacggaaacaggcagtgtctggtcgccgaaagttttattacaagataaagcactgttgtggtttacctgctctggttttctggcttcttttgtaagcggcgcatttgcttcatgcatttcacaatatgtgatggtgattgctgatggggattttgccgaaaaggtggtcgcggttgttcttccggtgaatgctgccatggtggttacgttgcaatattccgtgggccgccgacttaacccggctaacatccgcgcgctgatgacagcaggcaccctctgtttcgtcatcggtctggtcggttttattttttccggcaacagcctgctattgtggggtatgtcagctgcggtatttactgtcggtgaaatcatttatgcgccgggcgagtatatgttgattgaccatattgcgccgccagaaatgaaagccagctatttttccgcccagtctttaggctggcttggtgccgcgattaacccattagtgagtggcgtagtgctaaccagcctgccgccttcctcgctgtttgtcatcttagcgttggtgatcattgctgcgtgggtgctgatgttaaaagggattcgagcaagaccgtgggggcagcccgcgctttgttgatttaagtcgaacacaataaagatttaattcagccttcgtttaggttacctctgctaatatctttctcattgagatgaaaattaaggtaagcgaggaaacacaccacaccataaacggaggcaaataatgctgggtaatatgaatgtttttatggccgtactgggaataattttattttctggttttctggccgcgtatttcagccacaaatgggatgactaatgaacggagataatccctcacctaaccggccccttgttacagttgtgtacaaggggcctgatttttatgacggcgaaaaaaaaccgccagtaaaccggcggtgaatgcttgcatggatagatttgtgttttgcttttacgctaacaggcattttcctgcactgataacgaatcgttgacacagtagcatcagttttctcaatgaatgttaaacggagcttaaactcggttaatcacattttgttcgtcaataaacatgcagcgatttcttccggtttgcttaccctcatacattgcccggtccgctcttccaatgaccacatccagaggctcttcaggaaatgcgcgactcacacctgctgtcacggtaatgttgatatgcccttcagaatgtgtgatggcatggttatcgactaactggcaaattctgacacctgcacgacatgcttcttcatcattagccgctttgacaataatgataaattcttcgcccccgtagcgataaaccgtttcgtaatcacgcgtccaactggctaagtaagttgccagggtgcgtaatactacatcgccgattaaatgcccgtaggtatcattaaccaatttaaatcggtcaatatccaacaacattaaataaagattcagaggctcagcgttgcgtaactgatgatcaaaggattcatcaagaacccgacgacccggcaatcccgtcaaaacatccatattgctacggatcgtcagcaaataaattttgtaatcggttaatgccgcagtaaaagaaagcaacccctcctgaaaggcgtcgaaatgcgcgtcctgccagtgattttcaacaatagccagcattaattcccgaccacagttatgcatatgttgatgggcagaatccattagccgaacgtaaggtaattcatcgttatcgagtggccccagatgatcaatccaccgaccaaactggcacagtccataagaatggttatccgttatttctggcttactggcatctctcgcgaccacgctgtgaaacatactcaccagccactggtagtgggcatcgatagccttattgagatttaacaagatggcatcaatttccgttgtcttcttgatcattgccactcctttttcacagttccttgtgcgcgctattctaacgagagaaaagcaaaattacgtcaatattttcatagaaatccgaagttatgagtcatctctgagataacattgtgatttaaaacaaaatcagcggataaaaaagtgtttaattctgtaaattacctctgcattatcgtaaataaaaggatgacaaatagcataacccaataccctaatggcccagtagttcaggccatcaggctaatttatttttatttctgcaaatgagtgacccgaacgacggccggcgcgcttttcttatccagactgccactaatgttgatcatctggtccggctgaacttctcgtccatcaaagacggccgcaggaataacgacattaatttcaccgctcttatcgcgaaaaacgtaacggtcctctcctttgtgagaaatcaaattaccgcgtagtgaaaccgaagcgccatcgtgcatggtttttgcgaaatcaacggtcattttttttgcatcatcggttccgcgatagccatcttctattgcatgaggcggcggtggcgctgcatcctgttttaaaccgccctggtcatctgccaacgcataaggcatgacaagaaaacttgctaatacaatggcctgaaatttcatactaactccttaattgcgtttggtttgacttattaagtctggttgctatttttataattgccaaataagaatattgccaattgttataaggcatttaaaatcagccaactagctgtcaaatatacagagaatttaactcactaaagttaagaagattgaaaagtcttaaacatattttcagaataatcggatttatatgtttgaaaattattatattggacgagcatacagaaaaagcaaatcacctttacatataaaagcgtggacaaaaaacagtgaacattaatagagataaaattgtacaacttgtagataccgatactattgaaaacctgacatccgcgttgagtcaaagacttatcgcggatcaattacgcttaactaccgccgaatcatgcaccggcggtaagttggctagcgccctgtgtgcagctgaagatacacccaaattttacggtgcaggctttgttactttcaccgatcaggcaaagatgaaaatcctcagcgtaagccagcaatctcttgaacgatattctgcggtgagtgagaaagtggcagcagaaatggcaaccggtgccatagagcgtgcggatgctgatgtcagtattgccattaccggctacggcggaccggagggcggtgaagatggtacgccagcgggtaccgtctggtttgcgtggcatattaaaggccagaactacactgcggttatgcattttgctggcgactgcgaaacggtattagctttagcggtgaggtttgccctcgcccagctgctgcaattactgctataaccaggctggcctggcgatatctcaggccagccattggtggtgtttatatgttcaagccacgatgttgcagcatcggcataatcttaggtgccttaccgcgccattgtcgatacaggcgttccagatcttcgctgttacctctggaaaggatcgcctcgcgaaaacgcagcccattttcacgcgttaatccgccctgctcaacaaaccactgataaccatcatcggccaacatttgcgtccacagataagcgtaataacctgcagcatatccgccaccaaaaatatgggcgaaataactgctgcgatagcgtggcggtatagcaggaagatccatattttccgccaccagcgcccgcaattcaaaatcatcgacatcctgcattgcttcgttttcttccaggcaatgccagcgcatatcgagaagtgcggcgctaagcagttcgctcatctcataccctttgttgaacaggctggcattacgcattttctgttgcagttcgtcaggcattgctgccccgctctgataatgccgggcgtagcgagcgaatacctgcggatgcgttgcccagtgttcgttgatttgcgacggaaattcgacaaaatcacgcggcgtgttggtgccggaaagcgtggcataacgctggcgggcaaaaaggccgtgcagcgtatgaccaaattcatggaataaggttatgacatcatcccagagtaacaacgcaggctcaccggcagcgggtttctgataattgcagacgttataaattaccggatgtgttttattaagcgttgattgctcaacaaaattgcccatccatgcaccgccgctttttgaatcacgggcgaagaaatcaccgtaaaataacgccagccccacgccattatgatcaaaaatttcccacacacgaacgtcaggatggtagacaggaatatcaaaacgttcgacaaacttaataccgaagagctgattcgcggtccagaatacaccttcatttaacaccgtgtttaattcaaaatatggcttgagctgcgcctcatcaagatcaaatttctcccgccgtacctgttccgcataaaatgcccagtcccacggctgcgcgctaaacccgccctgctgcttatcgataaccgcctgtatggaggctaattcatcgctcgcacgttgacgcgccgctggaacaatttcccgcataaagttaagtgctgcttcaggtgtttttgccatctgatcggcgattttccatgcggcataatgaggaaaaccaagtagtgttgcctgttgtgcacggatctccaccagacgttgaatgatagcgcgggtatcattggcatcatttttttccgctcgcgtccagcccgcaataaacagtttttcacgcgtcgcacgatcgcgcatttcggcaagcgccggttgttgggtggtattcagcagcggaatcagccatttgttatccagacctttctcgcgagccgcctctgccgccagcgcaatctcttgctcactcattcctgccagctgcgcgatatcgttcacaaccagaccgccggatttatttgctgccagtaatcgctggttaaactggctggtcagggtcgcagcttctgtattcagtacttttaattttgctttatcagcttgcgcaagtttggctccggcaaggacaaaacgttgatgaatcacctccaccaggcggatggattcactatcaagccccagggattcacggcgctgccagacagcatctacccgcgcgaataattcaccgttcagatagatatcattagccagttccgccagttcagcggaaaactgctcgtcaagacgctgtaattcatcattggtatgcgccgcagtcatcgcaaaaaagacgctggtaacgcgggtaagtaattctccgctttgttccagtgccagaatagtattgttgaaatcaggcatttgcgggttaagcgcgatggcagcaatttctgcccgcttttgctgcattccctcatcgaatgccgggcgatagtgatgattggcaatttgatcaaaatggggagccagatacggcagtgtgctttgcacaaggaaaggattcattgttgtcattttcttctcctgaacgcgaggtgttccatagcgtaggcttactgataacggagtgcaatcttgcaatccagtattacccgctcttaagcatcccgtgctatgttattgacacacaaaagcgttgaggaacagtgagatgatcgttttagtaactggagcaacggcaggttttggtgaatgcattactcgtcgttttattcaacaagggcataaagttatcgccactggccgtcgccaggaacggttgcaggagttaaaagacgaactgggagataatctgtatatcgcccaactggacgttcgcaaccgcgccgctattgaagagatgctggcatcgcttcctgccgagtggtgcaatattgatatcctggtaaataatgccggcctggcgttgggcatggagcctgcgcataaagccagcgttgaagactgggaaacgatgattgataccaacaacaaaggcctggtatatatgacgcgcgccgtcttaccgggtatggttgaacgtaatcatggtcatattattaacattggctcaacggcaggtagctggccgtatgccggtggtaacgtttacggtgcgacgaaagcgtttgttcgtcagtttagcctgaatctgcgtacggatctgcatggtacggcggtgcgcgtcaccgacatcgaaccgggtctggtgggtggtaccgagttttccaatgtccgctttaaaggcgatgacggtaaagcagaaaaaacctatcaaaataccgttgcattgacgccagaagatgtcagcgaagccgtctggtgggtgtcaacgctgcctgctcacgtcaatatcaataccctggaaatgatgccggttacccaaagctatgccggactgaatgtccaccgtcagtaatttttatacccggcgtaactgccgggttattgcttgtcacaaaaaagtggtagactcatgcagttaactcactcacaagcaagaacgaatgaccgtcgaaacgcaacttaatcccacacagcctgtcaatcagcagatttatcgtattcttcgtcgcgacattgtccattgcctgattgctccaggcacaccgttgtcggaaaaagaagtttctgttcgtttcaatgtgtcacgccagccggttcgtgaagcctttattaaactggcggaaaacggcctgattcaaattcgtccgcaacgtggcagctacgtcaacaaaatttccatggcccaggtgcgcaacggcagttttatccgtcaggccattgagtgcgcggtggcgcgtcgggcggcgagcatgattaccgaaagccagtgctatcaactggaacaaaatcttcaccagcaacgcattgccattgagcgcaagcaactggatgatttttttgaacttgatgacaacttccatcaactcctgacgcagattgccgactgtcaactggcgtgggataccattgagaacctgaaagcgaccgttgatcgcgtgcgctatatgagtttcgaccacgtttctccaccagaaatgctgttacgccagcatcttgatattttctctgccctgcaaaaacgtgatggcgatgcggtagaacgtgcaatgacgcaacatttgcaggaaatcagcgaatccgtgcgccagatccgccaggaaaacagcgactggtttagcgaagagtaattcatttcctctcatcccatccggggtgagagtcttttcccccgccttatggctcatgcatgcatcaaaaaagatgtgagcttgatcaaaaacaaaaaatatttcactcgacaggagtatttatattgcgcccgttacgtgggcttcgactgtaaatcagaaaggagaaaacacctatgacgacctacgatcgtaaccgtaacgcaatcaccactggcagccgtgttatggttagcggcaccggtcacactggcaagatcctgtcgattgatactgaaggtctgaccgctgagcaaatccgccgcggaaaaaccgtagttgttgaaggttgtgaagagaaactggcaccactggacctgattcgtctcggcatgaactaagcgtgtgaatgccgccgatggcggcattgcttttttacttcacggaatattttgccacggtcgctttcgcgccatgcgctaataaagacaagtacgtttccgtcactcttgcagtaaacaaactattgtctggcaaatcatcaccaaagatcgccttaatcgccagcaatgactggacgcgcgctttcccttcggcactactttgtacagccttctgaataacaggtaacagtgggtcactgatttctatcggatttccctgttcatcaacaccaccgacataacgcatccaacccgcgacgcccagcgccagcagatcgaacttgctgtcatgcgccagatgccagcgaacagaatccaacatccgctgtggcaatttctggctaccatccatcgcaatctgccaggttcgatgacgtaacgccgggttgctatagcgtgcaattaatcggttagcgtaatcttgcaaatcaacgccctgcactttcaacgtcggcgcttgttcctgcaacatcaagccatacgccgcataacgataatgttcatcttccatacagtcattaatgtgctgatatcctgcaagataccccagatacgccaggaatgaatgactgccgttgagcatgcgcaacttcatctcttcataaggcagcacatcgctaaccagttcggctcccgctttttcccattccggacgtccggcaacaaagttatcttctattacccactggcggaaaggttcacaggcaacgcccgcaggatcgcgcacaccggtaagttgttcgattttcgccagcgtatcctctgtcactgcgggcacaatacggtccaccattgttgatgggaaagtcacgttatcttcgatccattgtgccagttttacatcaacggcttgtgcgtaggaagtgacaacgtcacgcataacatgaccgttttctggcatgttgtcacatgacatgacggtaaatgcgggaagtcctgccgctttacggcgagccagcgcctcaacaatcacccctgttgctgttttcggctggtggggattttgcacgtcggcagctaccatcgggtgatcgagcattaactgtccggtcgccggagagtggaaataccctttttcggtgattgtcagagagacaatcgcgatttgcggttcacacatcgctgccaacacggtttctaagccatctatctgtacgtgcaaggcttttttaacgacgccaacgacgcgagccgtccacacatcggccgacatttccgcaacggtataaagattatcttgctgttgtaaatcggcaatttgctgttcgccgccgattaagttgacctcataatatccccagtcactgaaatgttccgtagcaagaatatcggcatacacaccctgatgcgcacggtgaaatgcaccaaagcctaaatgaacaattcttggagccaggttattaagatcataaacagggagtgtcgcttttgctgataacaaattatttcccataacaattccttaaatataaatatggcaagctatatgttttgttatatgaataaaaatcccctctccggtaagagaagggattaagggtttacagacttctggaaggttgcgcagctcttacaacacgcggttgatcttccgcagcgtcttccagcgcacttaaatcacggtctttcacctctggcattttcagcgcagagattaaaccaatcactgaatatgccatgatcataatggcgatcggataccaggattccgtcatggtgcagaaaatacccgccaggataggaccaaaaccggaagcgataagaccaccaatttctttagaaatagccatccgggtaaagcggtttttacagccgaacatttctgccatggtaatgttttccagagcaaataatcccagcaccgcacagttatgaatcacaatcagtgcaaccataatggtgctcggggcatagcttttatctacaatgatagaaagcattggccatgccagcacaatcgcggaggtattcataataatatacgggatccggcgaccaattttatcggataaccaaccaaggaacggaatggtcataaagccgagaatcgaactgatcatcaatgcatctgttggaattgctttgttaaacaataacgtctgcactaaatagcctgcaaggaaagtctgaattaacccggagttacccgcctgaccaaaacgcagccctgttgccagccagaaggatttgctctggaacatgctaccagcaggtgcaggttttgctgtcggttggttactgtcgttaaccttctcaaagaccgggctttctttcagattcatacgcaaccagatagcaaagaccatcacgacaacactcgccaggaacggtatacgccatccccacgccagcagttcctctttactgagaatgaagaacataaaggcccagattgccgttgcgctcaaggttccgcagttagttcccatagccacaaatgaggagataattccgcgcttaccttttggcgcatattccgccagcatcgtaccggcaccggaaatttccgcacctgcacccaacccctgaataatacgcaacgtcaccagcaagatgggtgcaaaaacaccaatctgtgcataggtcggtaacacaccaattaaggtggtacagatccccatcatggtgatggtaataaagagcacttttttacgccctattctgtcgcccattttgccgaaaataaatgctccgacaatacgcgccacataacctgcaccgtaggttcccattgccagaattaacgccattgccgttgatgattcaggaaaaaatatttcatgaaacactaacgctgcgccgagcgaatataactggaaatccataattcacaggtgttttttcccatcctgtggtttccttggcgttttctaggttttttcagatagttgcatttttttaaaaagcatcctaagttcgatctcagtgtctatctggggcctatttctgtcccatatatgccccaaaaaaactccccaacagataagtagttttttcatggatttatgcgtaaaatcaagaacggctggaaatcattcaatactcacactatcgaaaaatttaccagccaatcgcagcacgttcttgcataaggtgtgtctgcggtttttcaactattcagatacatcactcccatcacattcattcctccgcatcaaaggcatataggctatatcaccttgatatttttctttttcagataaaaactgttatctatgtatacttttaaacccaatccgtgtagagtctctacataagatagtttgcagttgccgcttcagcttgcgccataaaccgcctgatttttgctgccacctgttagcattcctgtatacctgaaacgacaatgtttatctacgaactttaagaacacccaagataaaaattgtcaactatatcatatataacacattactaattcgaggctatatgaacagcatactgataatcacatctctccttatcatattcagcatttttagtcatgccctaataaaattagggattggcatatccaataacccagacaaaaccgatgtataagtcaacatatcctgaatcagacatacaatatcgcaatgaaaatcaataatattttaaggaatatcttcatgaaatcaaaagacaccctaaagtggttccctgcgcagcttcctgaagtaagaattatcctaggggatgctgtagtggaagtagcaaaacagggaagacctatcaataccagaacattgcttgattacattgaaggaaacataaagaaaaaatcatggctggataacaaagaattattacaaacagcgatatcagttcttaaagacaaccaaaatttaaatggtaaaatgtaatataataaacttacttttttatcatttttccactttaacaacattttgctccacttttccacgaccaaacaacttgaaatctggttaaaataacacgcaacactattcttcttccttgagtccgcccggaactcgaaaaacaaaccgagttaaagccatttttcacaaaatcgattttgggtctcaccaaaattacggggttgcatacgcattcgtttattttcgaacgtgtacatacaaatatgcacaaaaataatcataattattttctgagatgcattatgatatgaacaccaatttcgtatagagtctcactatgtctcaaatttttgcttactgtcggatatcaacgctggatcagaccaccgaaaatcaacgccgggaaatcgaaagtgcaggttttaaaatcaaacctcagcaaataatcgaagaacacattagcggctcagcagcaaccagtgagcgtcctggttttaaccggttgcttgctcgcctgaaatgtggtgatcaattgattgtgacaaaactggatcgccttggttgtaatgcaatggatatcaggaaaacagtggaacaactgaccgaaacaggtatcagagtgcattgcttagcattggggggcattgacctgaccagtccaacaggaaaaatgatgatgcaagtaatttcagcagtcgctgaatttgaacgagaccttttacttgaacgcactcattccgggatagtaagagcccgcggcgcagggaaacgttttggtcgaccacctgtgttaaatgaagaacagaaacaggcggtattcgaacgaattaagtcaggtgtaagtataagtgccattgcccgggaattcaaaacctcgcggcaaaccattttaagagccaaagcaaaacttcagacacctgacatataaaaaataatctcggtgtgagatgctttacgtcttccaagcccccttccttgccgtaaatggaaagatacatctaattatagaatttatatgttttaccctacggcagtgctggccattcaatatcctgtgcagttgacgtatcaacacggttcagcaatacccgatactttttccatgcttccagcaacgagatttcttcctccgttgcaatttccagatctgcagcatcctgaagcggcgcaatatgctcactggctacctgcatcaggttgttttttgtttcttccgcctcccggatccggaacagtttttctgcttccgtatccttcacccaggctgtgccgttccacttctgaaactccccttccggcgataaccaggtaacattttccggtaacggaccgagttcagaaataaataacgcgtcgccggaagccacgtcataaaccgttttaccccgatgatcttcaacgagatgccacgatgactcatcactgttgaaaacagccacgaagccagccggaatatctggcggtgcaatatcggtactgtttgctggcagacctgtatgaggcggaatatatgcatcaccttcaccaataaattcattagttccggccagcagattataaatttttatggtccgtggttgttcactcattctgaatgccattatgcaagcctcacaatatagttaaatgcgatgtttttgacggtgttttccgcgttaccagcagcgttaacggtgatggtgtgtccatgtgaaccaatcgcaacggagtgcgtatgagcaccaataccgacagtatgtgcatgcgcgcctgcgcttgcagcagtgccggacagcgagtgggtatgagcaccatctgatgatgtcttccctgcattacgagtctggccactaccgcttgttgtgctcataatccccgcgcttagatttgaaatcgcggtataaccattagggaaaatgctcgtgttcgtgccaccaaatgcaccggaactcttgtgttggtgcgcaccggcactatttgcggtcccgctaatactatgggtatgcgccccggtgttattcgtggatttggttccgtaatcaaacgacgatgtggtttccgtccccaaatccgtactggatgcgctggcgctgtgggtgtgcgatttaatgccgtcctgttcctgagataatacggcccgaccactggcgggcttgcccttaatcgtccagccacgcatatcagggatcacgcctgacggataagcaactgcaagtttcgggtatgcagatttgtcaaaagtctgcccctgcatcagggcataaccagacggaacggtatctgatggccacgggattggtgcaccgactggataaaactctgcaggaggatgagccgaggtgtaaagctgcgcccacggcgaccagtttgcgtcggtcgtatcccgtcgtgaacgaataaatgccggagcatgagcaccgcttgtaccactccagccgatgagtaactcaccttcgccaacggctgtcatccctttcaggtgaatgatatttccatacgctgttggatatccgttgttatacacctcgtataactcaagacctgctgccccctgcgtattgtctgtcagcgcggttatattcactcagcaaccccggtatcagttcatccagcgcggctgctttgttcatggctttgatgatatcccgtttcaggaaatcaacatgtcggttttccagttccggaaaacgccgctgcaccgacagggggatcccgtcgagaatactggcaatttcacctgcgatccgcgacagcacgaaagtacagaatgcggtttccaccacttcagcggagtctctggcatttttcagctcctgtgcgtcggcctgcgcacgcgtaagtcgatggcgttcgtactcaatagtccctggctggagatctgtctcgctggcctgccgcagttcttcaacttcccggcgcagcttttcgttctcaatttcagcatccctttcggcataccatcttataacggcggcagagtcataaagcacctcattacccttgccaccgcctcgcagaacgggcattccctgttcctgccagttctgaatggtacggatactcgcaccgaaaatgtcagccagctgctttttgttgacttccattgttcattccacggccaaaaacagagaaaggaaacgacagaggcccaaaagctcgttttcagcacctgtcgtttcctttcttttcagggggtattttaaataaaaacattaagttacgacgaagaagaacggaaatgccttaaaccggaaaattttcataaatagcgaaaacccgcgaggtcgccgccccgtaacctgtcggatcaccggaaaggacccgtaaagtgataatgattatcatctacatatcacaacgtgcgtggaggccatcaaaccacgtcaaataatcaattatgacgcaggtatcgtattaattgatctgcatcaacttaacgtaaaaacaacttcagacaatacaaatcagcgacactgaatacggggcaacctcatgtcaacgaagaacagaacccgcagaacaacaacccgcaacatccgctttcctaaccaaatgattgaacaaattaacatcgctcttgagcaaaaagggtccgggaatttctcagcctgggtcattgaagcctgccgccggagactgtgctcagaaaaaagagtttcttctgaagcaaacaaagaaaagagtgacattactgaattgctcagaaaacaggtcagaccagattgaagcaatttagataatcgtgcagactacgccccctcatatcacatggaaggtttatctatggatcaggtagtcatttttaaacaaatatttgataaagttcgaaacgatttaaactatcaatggttttattctgagctaaaacgtcacaatgtctcacattacatttactatttagccacagagaatgttcatattgtattaaaaaatgataatacagtgttattaaagggcctaaaaaacattgtgtctgtcaaattttcaaaggataggcatcttatagaaacgacctctaataagctgaaatccagagagatcacatttcaggaatacagaagaaaccttgctaaagcaggagtttttcggtgggttacaaatatccacgaacaaaaaagatattactatacctttgataattcattactatttactgaaagcatccagaaaactacacagatcttaccacgctaaaccataacgtccggcttctctcactcctgagccggactgcattggtttaataaaaaccatcaacaattgtgatttagatattcggaaccattcaaatataacaaaaccccgtaaaaacgaggtttatggataaattttattattgaatacatcagattaaattaatcttgacatcatagctttcaagacccgtcattttttcccgtgcggtaaactgaatactggtaacttctttcccggtctttttcttaagttcaataattttttttgttatatattcagaaatatctgcttctgcttttgtttttaagttttcaatattcatcatttcctcttttagtctgttatgactttccagttacacagtaagtcgattatatggtgcaaacgtgtaaaagataagatgaaacatcgcaataatcaacatacgatagtctaaattttacacaaacagacaaagagaattttcctgaattatcaatgcaatagcatcaaatcaactcaagagccttattgctgcttccagaatttcttctgaagtaacatgtcgatccgcggctacataaatgactttatgatctccggtcagagatggaaaccctgcggccattacagtaaggtgtgttttttcgccatttggatattcacgcatgatggtgttaactccagtcatcgctggcactaccactgctggttcagagttaaaaaaactatgatttttttcatgatgttaccgtagtatgtgagtatccatcgaatagacaccaagcaaaaaagctcccgaaggagccttcattttcacttttttaaatccaacgacagacggctggcatttaagtattgtgaaatattatcaaatgtaatcatcattgatttacaaaagatacattttgccccgaaaggattcatgtcagaaacatcaaaagatgatgttctatactgggaaccatgacaacacgggcatctaaagtgaatatggtttgtaatattgtctacctcaaagcgccactacatgaacagcggcaggacctttaggtccgttctcaataccaaattcaacttcctgattctcagttaatgttttgaaatcgttgctctgaattgctgagaaatggacaaacacatctttgctgccatctttcggcgtgatgaaaccaaaacctttttcagggttaaaccatttcactaaaccagtcattttgttagacataattattaccttttgaagaaattagcccttgggcagaatggtccgaaaaaaaatatcagagagaaaaaccaacaaggaaatctcaagaggtacaaataataaaattataacaatgactgcttcagataaatttgtaacaaaccagaacaccattaacgcatgattaaccacccatagcaaggattacttttgtaaagaaaaacacagcaatgaaagaatagctttatttattaataaaacgtgtcattctgattaagaccttttatcttacccttaagatttcaggaattttggctcatggaagagtcctttttatttaaattttacattccgcgatgtaaatgttccgatttaatattaccctacatttgatgctttttatctcttaaagattcatagatctgttgacaagtcactcctgcgatgtagcgttcgtcagcaatttcagcataaagctgagcttctgctgcaatatctccgagcatgttggtgagcattccttcggcggttttggttgttttgcctctgacggcagcggcaagatctgcggtatgcttcgctgcgtcaaggcgtatggcatatttttttgcttcggcacgcaactggttaacactatcagacagataagcagccctggcagaaatttcagcagatttctgttgcgcatctttaacagcctcatcacgggctatagttcgcccctgttcaattattcgagcagcaaattgagcatttacctcttgtgataatgcggcagcatcacgttccgcccattttttttgccatcctcggtcgctccagacatttccgacgataaatcctgacaacacgagaaaaatcaccatgaatatctgattcactgttctatcccccagcaggttaatgcgctctcctggtcacgacgaataacctgaccgtaacagttatttgaacgaatgcggcaatcgcgtccgccatccttaatccaccagcgaatcgcttcgcatgcacctttacgatcaccagcattcagccgcttataaaacgtcgacgggaaacacttaccggggccaatgttatagggacaaaatgacgcgatacccgctttttgtggttcggtcagtggtactttaatattgcgctccacccatgccagcgccttatcacgctcaatggcgttgacctggtcgcatttttccttcgacagtttcatattgggaaaaacggtttttccatccaccactgtggcaccccgacagatggtccatatgccagaaccatcgcggtatgccattgtgtggttaccttctttttcgtccagaaactggtcaagtatctgaggagcagatgcgccagcaccaatcagcgccagaacggcagccgacaggccgtatctgatttttgtgttcatagatatttatgatgaggacgctcgtgcttattggcaggattttcaatcttaaaggagtactgatgctgcagataagactcaactttttctgacaatttttctgctacttccaggaagacttgccggacgctccttctggctgctgcctcataaaactccagcgcagctccttcaacacggtccatggcgacatccaggtcaaaaatttcaccgtcaaagcgttctttgtcctgtaaggctacagttaccgtaactttattctcaaaattacggactcctttcacaaccagttcatagtcttgagtcattggattactctcctctcgcagccttacgcctgtcttctttaatcttgaaataaagatttgtcagatacgtcagcaggccaaaaaccaggctacccagcacaccgattgcagcccactgtgacggagttactttatcgagtaactgcaatgcccagaaaccagcattacccgccgatgtgccataggcaacacctgttgttaacttatccattgatttcatatcctcaccccgatgtacacggatggtgcaatatgtttgaaaagatcggagtctacggggtagttttgacagcacacgttgttctcaacggcgctaaaaaaacatacacattaaaaatgtgggtaattattttgaaagaaagtcatatataaaataataatacgagaaatgttttcatatttagtgtactgtatacggccatttatacaggaaaagcctatgtcagaacgtaaaaactcaaaatcacgccgtaattatctcgttaaatgttcctgcccaaactgcacccaagagtcagaacacagtttttcaagagtacaaaaaggtgcccttttgatctgccctcattgcaacaaagtattccagacaaatcttaaagctgtagcctgattgattttattagtaacaagtattttttatattttaataatatatttaaagcagataataaaaaacccgcctgagcgggtttgagattgtggtgctttttgtgggagtcatccacttacgcactttgttttgccatgccagcagttagcttctgctgtaaaactattcatgcagcaaacctgcacttcaccacaatggttagcatacttttcctgattaagattttgccaaatatgctagccattgtttcatgtattggacctccttactttttattaaagagatccaatattcactactctgtccgtatctctactcaggcatcagccttcttcgttatcgtatacagacgagcgatgaattttaatcagtaatgatgacatttgctgctgcaggacctttagcaccactctctatagagaaggtaaccttttgaccttcaaataaggttcgataattatcattctgaatcgcagaaaaatgcacaaacacatctttactaccatcaacaggagaaataaagccgaaacctttatcagcgttaaaccattttactaaaccagtcattttatttgacattctacattccttaacttgagcctttcggcataaatggtttgcataacagaaacgacttcgtacttaattggagagactcaaagaaggaataagtgaataacacctgaaatgagaactgctttagtaaactacttcgtatatcgtctgttcttcaaaccgacgcaatcattaacgcatagttgaacatatgaagcaatgtttattttagacatccagccatcttcaaccccatcaaaaaactatagctttcttcaggaacgtgtgtatagtgcgccaagttatcagtattaaggaatttttttgtcccgtaaaatgacaggaattgtcaaaacctttgacggcaaaagcggcaagggtcttatcaccccatccgatggtcgtatcgatgtccagcttcatgtttcagcgctcaatctccgcgatgcagaagaaattaccaccggattacgcgtggaattttgccggataaatggtctgcgtggcccttcagctgccaatgtttacctttcatgagctatattaaagctttaatttcaggccccatcggatcacacatggagagtttttatgaataaccccgtctgtcttgatgactggttgattggctttaaaagcttatgctgtactttggccgtaatagctctgctaataatataataagcagactcattgtgtttagggacattgtactggaagaaaacattttaaacatcaggcaaataaccaagtcaccagctaaataataagttaacagacatgagtcccgggatgagattcaacattaccattgccccatttaaagcacaaaacccgctcatcagcgggttttctactttttcttaacgtcgggtatacaaagcccatcgttgaaaaaattttatccatattttttgaaaaatgcaaacatcatgtcgccatcttcagcaaaaatcatttatctcgtcaccttcctcaattgcgcttccgcgtatgcttcttcctgccagcactttgttaccagtttaccaatgacgtccgcataccccttataccactgataatcggtcaggtctggtaccagcttctggacatgacgtcgtgccagcgtggtcggtaaacgactaaaccggtttccattacaacgcccacaaatcttatataccggtacgccatgaaaccgggttcttttttcatccagaacaatccctttacccttacaccctctgcacgctgtgctggcttcgcccttaccatggcaatgctgacatagttccttcacccattcttccttgattacagattccccgcgtctgtagtgtttcaccacttcgcgcaatacattataaaatcccgtacctgaacaatgctcacagcgagccttacttgccgcagacctggagtaatcagcaaaggcaaaactcacgaggtaaggaataatctgtaaccggatttcttcactcaatttgttcaatgtcgggttatccagtgccatcgcgtaatttagcaggccttcaatcgcaaactgagggtcctgaacaccaacttttgccagaaataaggccaacccaagtggtgctttcgactgcaccatcccctgcgctgccattacatccgtaattgttaaacaaccggtgcctgtcgctggagcgtcatcgctcaattttggagattttggggagtaatattttggtaaggcttcaaggttcatgctcgttctccacttacgccagtacgccaattgccagcgcgcgatcgataaaacgaaatatcagctccagttgggagccatacttatcttcaaatgccactgtatccgtatgcagctcgttgtgatgctttctgcacaaaggcaacacaaagagatcatgtgcttttgttcccattccgccctgcccgtgaccaatcagatgatgcggatcgtcggctggcataccgcagcaagcacacggctgtgtcttaacccaacgtgtgtatttctccttaacccagcggcgacgtttaggcagcttcatgaaagattccggagactctggatcaacggtgatgcttaccaccgtcttttcctgtggtgatttttgttgctggtgggcgtaaggcaacggtgcaagattttttgtgcgttgtttcaatatgctggtggcggtcagctctcccggtacgatgtcgctttcgcggtacaccgagcagattttttccgctggtaatcccagcgaacgacgcgatacagcctcaggtagtgcatccaccacctgattgcagaccgcccaccaggataattcagccaaagataattcccgctcctgcgtaccgcttattgcgtgacggatgacgtcaatcacccatgctgtcagattttgttgagcaagcagctccagtgattccgatgtctggtcacgcagttggttgtcgcagtgccagcacaacaccattgcgccggtaccataacggtgaatgactgtttcagtgtgatggtaatcgccattaggccactggcaggatgtaacatgacgtaatagccagtcggacaatgcgccaacgccgccagcagcacgaatcacccgttcgttactaaaaaacggcagcaatgttttgtcttccgccagcggctggcgaacggcaggaacgactccggatggcagattacgcatgctttttggttccggttccaccagcactcgaggattatgaaatatctgtatggattcacggcccggcttaaggaccaccagcccaagctcaggcaccagaacaggtctaagtaatacccgcacgttacctccagatccgttgctggaaagtgcgggacgcacgtggtgggcgttcggaataaggcagcctgacagagattatccagtgccgatagtcgagactgagagctttcttaacctcgaacccgcgcctgcggtaagaatgaatcagccattcggcctgttctgcagtgcatggagggtgctggaaccattcagacttgaatgcgtgagaataccgcccgtgcgtgcaggcaagaacgggcgaattatcagaattgtaatattttgcgttgcgtgccatcggttttctccggtggcacggtgttactcagcgggagttcagccccgcgcaagattgtagatgagtttattctcctgaaaaagcagaaaagccagcttttattccgatctctttcaatgcctgtaatgaagtgacaaactcaccttcgcgcaagataaatccgtccgtgacccgagcatccacaaaattaattaacgcagccccattctttcgcaaacacataatgcggtaatgactaacaagatttccattttcaacgcacacagcatagaggccatcttcacaaaaaattttacgcagttcttcgatgttcatcatcagaatccttccggataattagctctcccctttaagggaccatccctcttatccctgcgcgctacttaagtatttttgattctattccggcaccgtccagaacttcaaacgcgttgaaaataaaaacaaaaacccgccgaagcgggttaagtgcgggtgcgttgaggatgcctgccacatcagaggtggcgagggatttctcccccgccgggtctcttactcctcaggttcgtaagctgtgaagacagcgacctccgtctggccggttcggattcgtacctcgcagaggtctttcctcgttaccagtgccgtcactatgacggttaaacagatgacgatcagggcgattaacatcgccttttgctgcttcatagcctgcttctcctgtcaacgcaaagcagaagtgtcaccttcggtgcgaaacagagatgtcatgctttggttcagagaatgcgtttgaccgcctcgctatatacttccgagcgttctcttttcccaacagaaatcacgaaaacgacaactttctcgtctataacctggtatacaaggcgatagcctgaagaccggagcttaatcttgtaacaatcaggcataccacggagcttgtttgcttcaatccggggtgactcaagtacttcaaccagcttctttttcaactgttcacgtaccgtcgagcccagctttcgccattcctttagtgcccgctcgtcaaaatccagaaaatacgccatcagagttcatccagcgtcacacgtactggcttaggattacgaagccgttctttcactatctccacaagttcagcatcttcatcactcaggagtgtctgtttgaacggcaagcgttcattgtcagcgatatactcgagcatgagacgaagcgcttcagaaggagttacacccattttttcaagcgcggcgtaagaacgcgctttaagttcatcgtcaatacgcaggttaatgctacccatgtcttacacctcttgtaattacaaatgtcattacaagtatcgcactacaacatgcttagggcaagtcacgaaggaagtcagaaagtagtcgtaagaacggtgatcactgtccgctttgtgccaggagcagccattgctaagtccatcctgtattgtgcaggtcagctcgtttttaaagagtccggccatcatcttactggtacagacaccatatactttgtgacggtcaggctacatatgcacaactcaacttattcatctattttttgctttagcatgtcagtgttgctttctcgtcggcgggtgagcggtgacctgacctgtcgataaaggaacgtaacacgttttatgcaacacccgcatgcggcagaaaattattgccgaacgtttacccctgtcaacaagctttactttctgaggcgcgccagcccgcgaggaaaacaatctgaacatcaaacaattaatgacacaagaaatacgattaaagatttttttgtgcatgccgatagtgcttttttaaaaggagaaatctatgtctgtcacaattcagggaaatacctcaaccgttatttcaaacaactccgccccggaaggaacatcagaaatagccaaaatcacaagacaaattcaggtgctgactgaaaagcttgggaaaatctcatcggaagaggggatgacgacacagcagaaaaaagaaatggctgcattggtacagaagcaaattgaaagcctctgggctcaactggagcagttgttaaggcagcaggcagagaaaaagaatgaagacgcgacagttcagcctgataaaaaagaagagaaaaaagacgatacaaataccgctggcaccattgatatttacgtctaagtgacagccgtattgtggccctcatcgggccacttttcgccatcagccttttctttaaagacatattatctttgtatcatttctgatagttaacattacaagatataagtaatggacgcactcccaattagtctatttaaatcgccacgagtttaactgacaacccatgatcaattatgaattgcaactatttctgtagtcacttttgtggggacagtccacaaaactgccaacttccgcttcttgctcttagcggacattagcataggctatttaccataacgcctcattacgcgcaccgcccagactgactcagcgcgtttctggcatatccccggtaaaacaagtaacaaaccacccgaaaatgaacaccagaaacgcgacttaagaatctaccctatgaatggatatgcactcaaccgaatcgatcttggtttcaatcttttttatcgggatcaggcttctttttaggtaacttcgggggcttaacttgctgatgactttgcgttcggcgcgtaagccagggatggtcagctttaggtttaacatagtattttgagcgtaaatcaatacgggcattatccactcgttcatggacactcttttcatcatccagtggtagcctccataattgcaggcactagcgccgtgaacttttcacgcttatccctggtgtcgatagccttccagcgttcaaatatcttcactcgattaacgccaagcgctcgctgatcaatcgcgccaccttcatatgtgacacgctgaacatcgatgttcgggcgctctttcaaagcccagaatgcttcagtgattaatatcgtcgcctgctcctgtgtcattcctggtcgacatatccaggcatccagagcctcacgagcctgttcaggagtgattttcattgttcaaccgccccgcccgcttcgtcttacgatattcatcataaactttgggatcatactgaagctccccgccagatgcctcctgtagacgcatcgcgcgaccttcgggaactaaatcccctttccagctataaagcgaagccaaacgaatacctgctgcttgtgcaagttttgtttttgaaccgaaatacaaaagagcgtcagttttaagcatttaaaacacctttattgttagtcataactaacaagatagatgttaacaaaaacatagtcaatacgatttagcattagctaactatggaaacaaaaaatttaactatcggcgaacgcatcaggtatcgtcggaaaaacctcaaacacacccaaaggtctcttgctaaagccctgaaaatctcccatgtgtctgtatcacaatgggaacggggtgatagtgaacctacagggaagaacctttttgccctcagtaaagtattgcaatgctcaccaacatggattctatttggcgatgaagacaagcaaccaacaccacctgttgagaagccagttgccttatcccccaaagaactagagctccttgagctgtttaatgcactgccagaatcagaacaggatacccagctcgccgaaatgcgagctcgagtaaaaaacttcaataaactctttgaagaattactaaaagcccgtcagcggacaaataaaagataacatcatcaatgagttatcttttaccacatcaattatgttagctatagcatacaaaatcacttgaccgatatgttagtcatggctaatcttgtttgcatcaacacaccgcacggtgttctcagcaaacagttccgctaccccagcgttaaggggaaatgaggtcagcatggatactatcgatcttggcaacaacgaatctctggtgtacggcgtgtttccaaaccaggacggcacgttcaccgcaatgacgtataccaaaagcaaaacgtttaaaaccgaaaatggtgcccgtcgctggctggaaagaaactcaggtgagtgatatggatttcgacacaatcatggaaaaggcttacgaagaatacttcgaaggccttgccgaaggcgaagaagctctcagcttcagtgagtttaaacaggcgctttccagttcggcaaaatctaacggctgataagcgaaacagcaccgcgaggaatcagtatgcagaaacgagaacccgtcatcatcgcgccagactataccgatgatgaactttatgagtggatgcgccagaaaattaatgcagcgcaggatctgaaatgggctaatgaagccagggctaagcaggctgaaaatctgtccgctctggagcaggatatcaccaatctggaaaaagcagcggcattaagcattgccagaatgattacatacccgcgttagtagctaatcaacaaagctaaggttagtaattaaggagttctccacgggtgaggtggagtgcgtgcgccggacacgggtgcgcatccggaactgacagtttactgaaaggatatttccctgaaaagtcagaccataacgcgaaagcgcatggcgaggtagctggttcatagatagcctgtcgttaaattttcgtcgaccgtgcgcttccggttgtggcaacccgcgaaatggcgcggcggtaagtatggcggggttattccttccccgttgaggacaccgggttgtcaggttgaccatacgcttaagtgacaaccccgctgcaacgccctctgttatcaattttctggtgacgtttggcggtatcagttttactccgtgactgctctgccgccctttttaaagtgaattttgtgatgtggtgaatgcggctgagcgcacgcggaacagttaaaaccaaaaacagtgttatgggtggattctctgtatccggcgttaattgttaactggttaacgtcacctggaggcaccaggcactgcatcacaaaattcattgttgaggacgcgataatgaaaacgttattaccaaacgttaatacgtctgaaggttgttttgaaattggtgtcactatcagtaacccagtatttactgaagatgccattaacaagagaaaacaagaacgggagctattaaataaaatatgcattgtttcaatgctggctcgtttacgtctgatgccaaaaggatgtgcacaatgaattcagcatttgtgcttgttctgacagtttttcttgtttccggagagccagttgatattgcagtcagtgttcacaggacaatgcaggagtgtatgactgcagcaaccgaacagaaaattcccggtaactgttacccggtcgataaagttattcaccaggataatatcgaaatcccggcaggtctttaaaacagttccgtaataaatatccggtttcattcttatatgccagcaatggcagggatttgttcatccttaaatctgtcatgaggttaaaacaaatgagtaaagtctttatttgcgccgctattcctgacgaactggcaacaagggaagaaggcgctgtggctgtagccacagccattgaagctggcgacgaacgccgtgctcgagcaaaatttcactggcaattcctggaacattatccggctgctcaggactgcgcttataaatttattgtctgcgaggataaacctggcataccccgccctgccctcgattcatgggatgctgaatatatgcaggaaaaccgctgggatgaggagtctgcttcttttgtcccggttgagactgaatccgatccgatgaacgtcacttttgacaagctggcccctgaagtacagaacgctgtcatggttaagttcgacacatgtgaaaacatcaccgttgatatggttattagcgcacaggaattgttgcaggaagacatggcaacattcgacggacatatcgttgaagcgttgatgaaaatgccagaagttaacgccatgtatccggagcttaagttgcacgccattgggtgggttaagcataaatgtattcctggtgctaaatggcccgaaattcaggcagagatgcgcatctggaaaaaacgtcgcgaaggtgaacgcaaggaaaccggaaaatacacgtctgttgttgatctcgcccgcgccagagccaatcaacagtacactgaaaattcaacaggaaaaatcagcccggtcattgctgccattcatcgcgaatacaagcagacatggaaaacactggatgacgaactggcctatgggcgctgcttcgcagacaggcagaacttgatggtatgcctgcgatcaatgccaaacgtgtttaccggatcatgcgccagaatgcgctgttgcttgagcgaaaacctgctgtaccgccatcgaaacgggcacatacaggcagagtggccgtgaaagaaagcaatcagcgatggtgctctgacgggttcgagttctgctgtgataacggagagagactgcgtgtcacgttcgcgctggactgctgtgatcgtgaggcactgcactgggcggtcactaccggcggcttcaacagtgaaacagtacaggacgtcatgctgggagcggtggaacgccgcttcggcaacgatcttccgtcgtctccagtggagtggctgacggataatggttcatgctaccgggctaatgaaacacgccagttcgcccggatgttgggacttgaaccgaagaacacggcggtgcggagtccggagagtaacggaatagcagagagcttcgtgaaaacgataaagcgtgactacatcagtatcatgcccaaaccagacgggttaacggcagcaaagaaccttgcagaggcgttcgagcattataacgaatggcatccgcatagtgcgctgggttatcgctcgccacgggaatatctgcggcagcgggcttgtaatgggttaagtgataacagatgtctggaaatataggggcaaatccacaggtgaactacgctcctctgtttgttacgcaataaaaactggtgttttcgactatgcaaaacagtttccctcctcacgcaatctggaaaaatttggtgaggcccgacaagatttaaccataaaagaactggctgaaaaatttctggcactgaaagaaactgaagtcgccaaaacatcactcaacacataccgtgccgtcatcaaaaatatcctgagcataatcggtgaaaaaaatcttgcctcatcgattaataaagaaaaattactggaggttcgtaaagagttactgactggataccagatccccaaaagtaactatattgttacacaaccagggagatcggctgtaactgtaaataattacatgacaaatcttaacgccgtgttccagtttggtgttgataacggttacctggcagataatccgtttaaggggatctcgccattaaaggaatcaagaaccattccggatcctctttcgcgggaagaatttatccgtcttatcgatgcgtgcagaaatcagcaagcaaaaaatttatggtgtgtttctgtttatactggagttcgccctggtgagctgtgtgcacttggatgggaggacatagatctgaaaaatggaacaatgatgatcaggagaaatttagcaaaagaccgtttcacggtaccaaaaacacaggcgggaaccaatcgggtcattcatcttattaagccagcaatcgacgctctccggagtcagatgacattaacgagactgagcaaagagcatatcattgatgttcacctcagagagtatggcagaacagaaaaacaaaaatgcacctttgtttttcaacctgaagtgtcagcgagagtaaaaaattatggtgaccattttaccgttgactcaataaggcagatgtgggacgcagcgataaaacgtgccggactccgccatcgaaaatcatatcagtcgagacatacttatgcctgctggtcgctgacagctggtgctaacccggcatttatagcaaaccagatgggccatgcagatgcgcaaatggtatttcaggtatacggaaaatggatgtctgaaaacaataatgcacaggtagctttgttaaatacacagttaagcgagtttgccccaaccatgccccataacgaagcaatgaaaaattaatttaatatttatcaaatagttaacacgcatgactcttgaaatccataaattcaagcgcagtgcccagccatcccgatactgctgctttcaccaaatccttagtgcttctttcgtgtttttctattgtcataatggttatctctaaaaaagaggtaagatgcgtactacttactcgccgttattggtattattcagaaaaagtgagtaagactttgcagcaatgtttttgatcctgttcaaataaactaatggcatcagcaacatgctggaaatcaaacgtatgggtaattaatttttctggtttaattaaccctttacttaaccagtcgataacgatcgggaatttatttgcatttaagcgtgaagagaaaatagagagttcttttccggtaattccttgctgaatcacttcagacggttcactggagaaccccatcaatacaatacgtgccgctggagaagccagcgttacggcctctttcaggatagaaggatgacaagccgcatcgataattaatgtcggcttgatgcctttttcagtgaaaatctcgccaagcggtgtctggctgttattaatcgcccagtcagccccgctctctttcgctttttccagtcgttcatcaatgcgatcggcaacaatcacatttttaacgttatagacgccttttaatacctgaacgatcgtcaggccgattggaccggcaccataaaccagaacggtatcattttcagtcggttgaccatgtccggttacgttagccgcaatggtaaaaggttcgatcattaccgcatattgatcggccactgcttcaggaattttccacgcattttttgccggaaccacggcatattcactgaaaccaccgtcagcgtgcacacctaatacagccagtgtcgtacaaacgttcggtttacctatagagcacggatagcaatgcccacagctgaccaccggatcgacagcaacacgttcaccgactctggcgctttccacgccttcacccactgcatcaatgacgccaaagaattcatgaccaatgacgcgcggatatttcgcaaaaggattatgcccacgataaatatggctatctgaaccacaaattccggcaagtttcacttttactcgtacttcacccgctgacggggtgggtatttcacgttcgacaatcgccagttgattcggtttttcaattaatatgcttttcattatcttactccttaccagttccacagcgtgccatcttccagacgtgcgactggtagataagcaggttcatagggatatttcgccgccagcttttcatcgaattcgataccaagacccggtttgtctcccggatgcatatagccgttatcgaaagtccagttgtgcgggaagacttcgagcatttgttcggaataacccatgtattcctggacaccgaaattggggacccacagatcaaagtgcagcgccgcagccatgcagactggtgacaaatcggaaggaccgtgtgagccagtacgtacctgatacagcgaagcaaaatcggcaatccggcgcataccggtaattccgcctgcatgggtcagcgtggtgcggatataatcgatgagttgctcttcaatcagttgtttgcagtcccagatgctgttgaagacttcacccactgcgatgggtgtgacggtatgttggcgaatgagacggaagcattcctggttttccgcaggcgtcgggtcttccatccagaacatgcgataatcttcaatgcttttaccaaagcgcgccgcttcaataggcgttaagcgatggtgcatgtcatgcagcaaatgttcattaaaaccaaacttgttacgtaccgcgtcaaacaatttcggcatgaaatcgaggtatttctccgtcgaccacagctgctcttccggccactgtcctttggttgcgggttcataagccagacctttacctttcgacatgccgtaggtggttttcataccagggattccgcactgcacgcggatggctttgaatccaagctcttgatgacgggcataatcatccagagcttcatcaatactgtgaccggtggtatggcaataaaccatcaccccttcacgagacgcgccgccgagtaactggtaaagcggcatgttggcagctttggctttaatatcccacagcgccatatcaaccgctgaaatggccgacatcgtaaccggaccgcgacgccagtaagcacctttatagaaaaactgccagatatcttcgatacggtgcgcatcgcgaccaataagctgcggacaaaggtgatcctgcaaataagaggccacggaaagctcacgtccattgagggtggcatccccaaggcccgtaataccgtcctcagtggtgatttttaatgtgacgaaattacgccccggacaggtaacaaaaacttcagcctttacgatcttcatgttcgattccttgcatcgcttgtcgtgatgcatgaaatctacgcaactgagctactaccatacaagtataaagatcgaaaaaagccggagtgatcacaaaaaaaggcgtatatttgcgctgtgaatggttgacaaaagatgaaatagaataccttttgtcagctgacacttcctcttatcttattgataaaatggatttatgttcctacgtgcgcccccagcccgcaacaatgatcaacatgccgcaaagcgcaatcaacgcacccgtccagtcataaagagtcagtttcacgccatccacaacgcgcagccacatcaacgccgtgcagacataaacgccaccataagccgcgtaaacacgcccactcgccgctggatgcaacgttaacaaccagacaaacagcgccagtgaaatccccgccggaagcaacagccagatactggcgtttcgttttaaccacaaccagggcagaaagcatccaataatttcacacagcgcagtagcaaaaaatagtaacgttgttttaatcatctttgtctcttattgacatcatgtatagttatagggcgacataatatcatcaatataaacaccctcctggtacgttttgcgtccgcagtggatggtgtagaatcacctttaatcattcatacagggaatgaattatgaaaatcactctcagcaaacgaatcggcctgctcgctattctgctgccttgcgcactggcattgagcacaactgttcatgccgaaactaacaaactggtgattgagtctggcgacagtgcacaaagccgccagcacgccgctatggaaaaagagcaatggaatgacacgcgcaatctgcgccagaaagtgaataaacgcactgaaaaagagtgggataaagccgacgccgcttttgataaccgcgataaatgtgagcaaagcgccaacatcaatgcctactgggagcccaatactttgcgctgcctggaccgtcgaactggccgcgttattaccccctaacctgttattgatttaaggaatgtaaggacacgttatgccaagcgcccacagtgttaagctacgcccgctggagcgtgaagatttacgctatgtacatcaactcgacaataacgccagtgtgatgcgttactggtttgaggaaccctacgaagcctttgttgaactctctgatctgtatgataagcatattcacgatcagagcgaacggcgctttgtggtggaatgtgacggcgaaaaagccggtctggtggagctggtggaaattaaccatgttcatcgccgcgcagaatttcagataattatctccccggagtatcaggggaaaggtctggcaacccgtgccgccaaattagcaatggactatggctttaccgttctcaatctctataagctgtatctgatcgttgataaagagaatgaaaaagcgattcacatttaccgcaagcttggcttttcggttgaaggtgaattgatgcacgagttctttattaatggtcaatatcgtaatgccattcgcatgtgtatattccagcatcagtatctggcagagcacaaaacaccgggtcagactctcctgaagccgaccgcacaatagcattaataataatcgatcgtatttttgatggtgtaaacccgttcgacggcgggttttactccttcatcaacaatgattagctgacagtccaccggattagcgtgactgtcatattcacagctctgttttacattaccaacccgttgattattcagtaaagtaaccgctgtgtaatctaattttttgatcggatccgttgatggcgtggcgctgacagataatgttttgtcgttacttttcgtggttttacccagcggataaccctgatcatcatagcgatattccatctgcatttgtttgctgctggctttaatcacgaagccattatcatcggtttcccaactcaccccggcagaaggtaattctgctagctggcattttccctgtaaacgtactctcttctccagcgtctcggcatcacggtaataattggcgtccagtaccagagcgaccacggtattattttccagatccagtaattcgagtgaatcaaaacagccttcttccgacaaagtcccagaaacacgtttcgtcacttcaccttgctcatccattaatgtctgagtgaaatcttttaccggaccacgcagcggatcaaaatcgaattcattagagaaactggccatctcaggggtaaatgaaagtgttacctctgtgcggtcacatcctgtgaggaatatcgcgagtaagcatggtagtaatttgtatttcacaacagtcaccagagagtagagatgattctcaatcatagtagcaaatacagtactttacacgttaaatgctatgcttaaagaagttatcttcgcgtaaggagcttatgatgaaactctcaacctgctgtgccgcgcttctgctcgccctcgcctcacccgcggtactcgccgcgccgggatcctgtgagcgcatacagagcgatatatcacagcgcattatcaataatggcgtacccgaaagcagcttcacgttaagtattgtacccaatgaccaggttgatcagcctgattcccaggtcgtcggccattgcgctaatgatacgcataaaattctctatacccgcaccaccagcggtaacgtctctgctcccgcgcagtctagccaggatggcgcgcctgccgaaccgcagtaacacattatcgactgaacgccggatatgacaaatccggcgatttgaacatacaacataatcccaccttattactcatacccttctattgatatggattaataattcttaacccaaaatgggtagactccctctattgttagcgcgctaaatattcaatatataaacttttatataacgataaagaacagggagtgagttatgtccaaaaatgaacgaatggtgggcatcagccgcagaacactcgttaaatctaccgcgataggttctctggcgctggctgcaggcggtttttctttgccgtttaccctgcgcaatgcagcagcagcggtacaacaggcccgcgaaaaagtggtctggggtgcctgttccgtcaactgtggtagccgctgtgcacttcgtctacatgttaaagataatgaagtgacctgggtggaaactgacaataccggcagcgatgagtacggcaaccatcaggtacgcgcctgtttgcgcggtcgctccatccgccggcgtattaatcatcccgatcgcttgaattacccaatgaaacgcgtgggcaaacgcggcgaaggcaaattcgaacggattagctgggatgaagccctggatactatcgccagtagcctgaagaaaaccgtcgaacaatatggcaatgaggctgtatatattcagtactcttcggggatcgttggcggcaatatgacccgctcttcgccatcagcctcggcggtcaaacgcctgatgaactgctacggcggttcactcaaccagtatggctcctacagcactgcgcaaatttcctgtgccatgccctacacctacggcagtaatgatggcaacagcaccacggatattgaaaacagcaagctggtcgtgatgtttggtaacaacccggcagaaacccgcatgagcggtggtggcatcacttatcttcttgaaaaagcgcgcgagaaatcgaacgccaaaatgattgttatcgatccgcgatataccgatacggctgccggtcgtgaagacgaatggctccctattcgcccgggcaccgatgccgcgctggttgcgggtattgcctgggtattgattaacgaaaatctcgttgatcaaccttttctcgataaatactgcgtcggctatgacgaaaaaaccttacccgcagatgcacccaaaaatggtcactataaagcctatattcttggtgaaggtgacgataaaacagcgaaaacgccgcagtgggcttcgcaaattaccggtatcccggaggaccgtatcatcaaactggcgcgtgaaattggcacagcaaaacccgcttatatctgccagggctgggggccacaacgccaggcaaacggcgaactgactgcacgcgctattgctatgttacctattttgacgggcaatgtcggcatcagcggcggaaatagtggcgcgcgtgaatcgacctataccattaccatagaacgcctgccggtgctggataatccggtcaaaacgtcaatctcctgcttcagctggacagatgctatcgatcatggtccgcaaatgacggcaatccgcgacggcgtccgcggcaaagataaactggatgtgcccattaagttcatctggaactacgcgggaaataccctcgttaatcagcattctgacatcaacaaaacgcatgaaattctgcaggacgaatcgaaatgcgaaatgattgtggtcatcgaaaactttatgacctcatcggcaaaatatgccgacattctgctgccagacctgatgaccgttgagcaggaagatattattcctaacgactacgccggtaacatgggatatctcattttcctccagcctgtcaccagcgaaaaattcgaacgcaaaccgatttactggatcctgagtgaagtcgcgaaacgtcttggacctgacgtctatcaaaagttcacagaaggtcgcacgcaggaacaatggttacaacatctgtacgccaaaatgcttgccaaagatccggcgttaccgtcttacgacgaactgaaaaaaatgggtatctataagcgtaaagatcccaatggccattttgtcgcctacaaagcatttcgtgacgaccccgaggcaaatccacttaaaacgccttccggtaagattgaaatttattccagcaggctggcggaaattgcccgtacctgggaactggaaaaagatgaagtgataagcccattgccagtttatgcctcaacctttgaaggctggaactcccctgaacgtagaaccttcccactgcaactgtttggtttccattacaaatcccgtactcactcgacctacggcaatattgatctcctgaaggctgcctgccgtcaggaggtgtggatcaaccctatagatgcgcagaaacgtgggattgccaacggcgatatggtgcgggtgtttaaccatcgtggcgaagttcggctaccagccaaagtaacaccacgtattctccctggagttagcgctatgggccagggagcctggcacgaggccaatatgtctggcgataaaatcgaccatggcggctgtgtgaatacgctaaccactctgcgcccttcaccactggcgaagggaaacccgcagcacactaatctggtcgagatcgaaaaaatataacccacgacaaccataaattctggcatgacattttgtttgaaaagcaataagtgagtaatgatgaaaatccataccacagaggcgctcatgaaggctgaaatcagccgtagaagtctgatgaaaacctccgcacttggcagtcttgcgctggcaagcagtgctttcactctgccattttcccaaatggtccgggcggcagaggctccggtagaagagaaagcggtctggagttcctgcaccgttaactgcgggagccgctgtctgttacgtttgcatgtgaaagatgacaccgtgtactgggtggagtctgatacgacaggtgacgacgtctacggtaatcatcaggttcgagcgtgtttacgcgggcgctctatccgccgacggatgaatcatcctgataggttgaaatatcccatgaagcgcgtcggcaagcgcggtgaaggtaaatttgaacggataagttgggacgaagccctggataccatcagtgataatcttcggcggatcctgaaagattacggcaatgaggctgtacatgtcctgtacggaacaggcgtagatggcggaaacatcaccaactcaaacgtcccgtaccgtctgatgaactcttgcggtggttttctcagtcgctatggcagctacagtaccgcacagatcagtgccgcaatgagttatatgttcggtgccaatgatggcaacagcccggatgatatcgccaatacgaaactggtcgttatgttcggaaataacccggcagaaacgcggatgagcggcggtggtgtcacttactacgtcgagcaagcccgcgaacgttcaaacgcacgcatgatcgtcatcgatccacgttataacgacactgctgccgggcgtgaagatgaatggctgcccattcgccctggcaccgatggcgcactggcctgtgcgattgcctgggtactgattactgaaaacatggtcgatcagccatttctcgacaaatattgtgttggttacgatgaaaaaacgctgcccgccaacgcaccacgtaacgcgcattataaagcctatattctgggcgaagggcctgacggcatagctaaaacgccggaatgggcagcaaaaatcaccagcatcccggcagaaaaaattatccagttggcacgagagatcggttcagcaaaacctgcttatatttgtcagggttgggggccacaacgacattccaacggcgagcaaacatcccgcgctattgccatgctttccgttctcaccggcaacgtcggcataaacggcggcaactcaggcgtacgcgaaggtagctgggatctgggggtagaatggttcccgatgctcgagaatcctgttaaaacgcagatttccgtctttacatggacagatgccatcgaccatggtacggaaatgaccgcgacccgtgatggtgttcgtggaaaagaaaaactggatgtccccatcaagtttttatggtgctacgccagtaacacattgatcaatcaacatggcgacatcaatcacacccatgaggtgcttcaggatgacagcaagtgcgagatgattgttggcattgaccacttcatgacggcctcggctaagtattgcgatatcctgttgcccgacctgatgccaacagagcaagaagaccttatctctcatgaatctgcagggaatatgggctatgtgatcctcgcccaacccgcaacctcagcaaaatttgaacgcaaacccatctactggatgctgagtgaagtcgccaaacgcttaggaccagacgtttatcaaacctttactgaaggtcgcagtcagcatgaatggatcaaatatctccatgcgaaaacgaaggaacgtaaccctgagatgcccgactacgaggagatgaaaacgaccgggatctttaagaaaaaatgcccggaagaacactacgtcgctttccgcgcattccgtgaagatccacaggcaaacccgttgaaaacaccttcggggaaaatcgaaatttattctgaacgactggcgaagattgcagatacctgggaattgaaaaaagatgaaattattcatccccttcctgcgtataccccaggttttgatggctgggacgatcccctgcggaaaacctatccactgcagttaacgggcttccattacaaagcgcgtacccactccagctacggcaatattgatgtgttacagcaggcctgcccacaagaggtgtggatcaaccccattgatgctcaggcacgcggtatccgtcatggcgataccgtgcgggtatttaacaataatggagaaatgctgattgccgcaaaagtgactccgcgtattctgcctggcgttaccgccatcgggcaaggtgcgtggcttaaagcggatatgtttggtgaccgggtcgatcacggcggcagtatcaatattctgacctctcaccgcccttcaccgctggcaaagggaaacccgtcgcacagcaatcttgtccagatcgaaaaggtttaaggagtagcccatgaccacacaatatggattttttatcgattccagccgctgtactggctgtaaaacctgcgaactggcgtgcaaagattttaaagatcttggcccggaagtcagtttccgccgtatttatgaatacgctggcggcgactggcaggaagataatggcgtctggcaccagaacgtgttcgcttattatctctccatctcctgtaaccattgcgatgaccccgcatgtacaaaagtctgccccagcggcgcaatgcataagcgtgaagatggctttgtggtggttgatgaagatgtttgtatcggctgccgctactgccacatggcttgtccgtacggcgcgccacagtacaatgctgaaaaagggcacatgacgaagtgcgatggttgttattcgcgcgtcgccgaggggaaacaacccatatgtgtcgaatcctgcccgctgcgtgcacttgagttcggtccaattgaagagctgcgccagaagcacggcactcttgctgccgtcgcgccactgccgcgcgcgcatttcacaaaacccaatatcgttatcaaacctaacgccaacagccgcccgaccggcgataccactggttatctggctaatccggaggaagtgtaaaatgggaaatggatggcatgagtggccactggttatctttaccgtattgggtcaatgcgtagtaggcgcgctgattgttagcggaattggctggttcgccgccaaaaatgacgcagaccgtcagcgtattgtccgtggcatgtttttcctctggctgttgatgggcgtcgggtttattgcctctgtcatgcacctgggatcgccactgcgggcgtttaactccctgaatcgaatcggagcttctggtctgagtaacgagattgctgccggttccatattttttgccgttggcggattatggtggctggtggcagtcatcggtaaaatgccgcaagcgttggggaaactctggttacttttcagcatggcgctcggcgtcattttcgtctggatgatgacctgcgtgtatcaaatcgacaccgtgccaacctggcataacggttacactacgctggctttcttcctgacggtattgttgagcggtccaatacttgctgccgcaattctgcgggcagctcgcgttacatttaataccacaccatttgccatcattagcgttctggcgctgatcgcttgtgccggggtgattgtgctgcaaggtttgtctctggcgtctattcactcatccgtgcaacaagccagcgcactggtaccagattacgcctccttacaggtctggcgtgtggtattgttatgcgcaggtcttggatgctggctttgcccgctcattcgtcgccgtgaacctcacgttgccggacttattctggggctaatcctcatacttggcggtgagatgatcgggcgtgtgctcttttatggcctgcacatgacagtaggaatggctattgcaggttaacaaattggtgcggggcaacccgcacatttcaggatgttaggaatgacccatttttcacagcaagataatttttctgtcgcggcgcgcgtgttgggcgcgctgttttattacgctccagagagtgcggaagccgcacctctggttgcggtactcaccagtgacggctgggaaactcagtggcctctaccagaagcgtcattagcgccgctggtgacggcttttcagacacagtgtgaagagactcacgcccaggcctggcagcgtttgtttgtcggcccgtgggcactgccgtctccgccgtgggggtcggtctggctggatcgcgaatctgtgctgtttggcgattcaacattggcacttcgtcagtggatgcgcgagaaaggcattcagtttgaaatgaagcaaaacgaaccggaagatcattttggttcactgctgttgatggctgcgtggttggcggagaatggtcgccagacagaatgcgaagaattgctggcatggcacctttttccgtggtcaacacgttttcttgatgtttttatcgaaaaagcagaacaccctttctaccgtgcactgggtgaactggctcgcttaacgctggcgcaatggcaatcacaactgttaattcctgtcgcggttaaaccgctgtttcgataggatcaccgtaatattgccggatggtgacgattacgcgcaatccggcaataataggttacagtgtcacgtttttttatctcttaaagcacgcactgcttttgcggctggcctcttttgccgcaaaatagtcgcccgtgtttcattgcccatttctgctcatgcatcatctacacatctatccggatctgcgcactatgttccaccgtctgcttatcgcaacagtcgtcggtattctcgcggcctttgccgttgccgggtttcgtcatgcgatgctgctactggagtggttgttcctcaataatgactccggcagtctggtcaatgcagcgacaaacctttccccctggcgacggttgctaactccggcgctcggcggactggcggcgggtttgttgctgatgggctggcagaaatttacccaacaacgccctcatgcgccgaccgattatatggaagcgttgcaaaccgatggacagttcgattacgcagcaagcctggttaaatcgcttgcctctctgctggtagtaaccagcggcagtgcaattggtcgcgaaggtgcgatgattcttttagctgcccttgccgcctcctgttttgcccaacgttttacgccacgccaggagtggaaattatggatcgcctgtggggccgcggcgggaatggctgcggcctatcgtgccccgcttgctggcagtttatttatagccgaagtgctgtttggcactatgatgttggcctctctcggcccggtgattatttccgccgtcgtggcattgctggttagcaatctgattaatcatagcgacgcgttactctacaacgtacaactctcagtgacggttcaggctcgtgactatgcgctgattatcagtacaggtgtgctggcaggtctgtgcggaccactgttgttaacgttaatgaacgcctgtcatcgtggatttgtgagtctcaaacttgcgccgccctggcaactggcactaggcgggttgatcgtgggtctgctttccctgttcacacctgcagtgtggggcaacggctatagcaccgtacaatcctttttaaccgccccaccactgttaatgatcattgccgggatcttcctttgtaaactgtgtgccgtgctggcgagtagcggttccggcgcacccggtggggtctttacaccgacgctatttatcggtcttgccattggcatgttgtatggtcgtagcctgggattatggttccctgatggcgaagaaattacacttttactcggattgaccgggatggcgacactgttggcggcgaccacgcacgcgccgattatgtcgacgttgatgatatgtgaaatgaccggggagtatcagctactccccggtttattgattgcctgcgtaattgcgtcggtaatttcgcggacgttacaccgtgactctatctaccgccagcacactgcgcagcatagctaagcggatgtattgccccagttcacgctgttcggcgcgcggcagataaggcagttcaccaatgagcggtgccggaagttttttacccagcacatcaatgatttccgcataatgcgccagtcctgggttgattcggttagccacccagccaatgagcggcagcccgtcgttggcgatcgcctgagctgttagcagtgcatggttaatgcaaccttcctgaataccgacaaccatcaacaccggcagttgttcctgcactacccattcagagagtggacgcaaatcattcatcagactgcgccagccgccagtcccttctaccacgacatgatcgactttttcggtcaggtttgccaggccgtttgaaatgagggtgtaattgattgggcaactgtgcgccacgctactttcttcttcgcttaacgcgataggattaactgcttcataaggcagttcgatggttgaaacactctgcaacaccagggcatctttattacgcagcccttcgggtgtctctttgctccccttcgctacgggtttatatcccgcaaccgtttttccctgggaggctaacgcttgtagcaatgcgcgggaaaccaccgttttccctacagaagtgtctgtaccggtaataaagaaacgcttcagcatcactaactccaccgttatgcttcacaaatataaaccaggaaaataattaaccttgaaagtctaagttatgctttcctggcccaaattgagatagcgcaaattttggtagaacagttaaaaaatgttaaccctgcaacagacgaatcaacaaagaaccgttatacatcgcgtcttttaccagtgcagcgcctgccatcgtgccctggttagaaaactgagtactctcaacgctgatgtgctgactatacgcaggaagggcctgctgacggatgctgtctgagatgaccgggaagaggatatctgccgctttacttaacggtgagccaatcagtattttttgtgggttaaataaattcaccatgatggcaagaatgcgcccgacatgcgcgcccaccccggtaatgatgtcttttgccagtagatcgccgcgcaatgccgcctgacacaatgagtccacggttaacggttgtccatgtaacatcgagctcatggattgattaagacgcagctgtgccagctcaagaatactgtccacgctggcgatggtttcgaggcagccgtgattcccgcaataacagcgtttcccatacgggtcgacctgtgtgtggcctatttccacgagactactgctgcctgcgtgtagcagatgaccatcggtaatgacgcccgcccccacgttgtgatcgataaccacctgaatcacatcgcgcgccccgcgtgaggcaccaaacaaggcctctgccatcgtccatgcgctgatatcatgctgaatataaaccggaacgccggtatgctgctccagcgcctcgccgagcggcatctcttttacatcctcgtagaacggcatgcgatgtacaataccattttccgtatcaataattcccggcaaggttatggcaatcgaagttagacgctcaagttttttctggtggcggataaaaaactgatcgatatgggaaataatacgatccagcaatggcaagtcatcttttaacgccagttcctgcgactcttccaccaccagtttgctgctcagatcgcgcagagcaaggaaaatctccccgcgactaatgcgcagagaaagatagtgccaggcttcagtttcaaccaccagccccaccgccggacggccacggttccccgcttctttgatttccagctcttgcaccaggtgtgcttcgagcatctcacggacaattttagtgatactggcaggagccagttgcgccagacgggaaagatcgatacgcgagactggaccaagctgatcaatcaggcgataaaccgcgcccgcgttggtctgctttatttgatcaatgtgcccaggctggttttcagcaaccaccgcatactccctatattttcgcgctccgaaataatctgtaggctatggtgaagcacttcaatacgtgtcgtcaaatttttacttaggcatgtgattaacagcacatttttcgggctttttcgctgaaatttccctcacctgagagcattcagcagatgaatacgaaagttacgcgcagccggactttgttcatgatgtttcggccagaccaaccacatttcagaaaccgcatcctcttcagcaatcggcacccagcgcatttcgttgagctgaacacgtttaaatgacgcaggcaaaattgaaacacccagaccggcggaaaccagaccgatgatggtcattgcctcgcccacctcctgagtgatgacgggcgtcaaatggtaacgtcgcatcagcccgagaatatcgtcatacagccctgtcccgacgtgcggatcaaaaaagacaaagggttctttcgccagttcagccagcgttacattcgggttatttgccaggggatgatcgtgcgggatcatcgccataagcggttcatggacgatgactgcgtgttcaagcgactccggtaacgctgtgttacgcagcaatcccatatccagcgttccttcaatgagcggagcgatttgctcgcgagtgttcatttcgcgggtttgtaaatggacatcaggataatcacggcgaaacagcgataacgtatcggacaccgcccgaataaaaggagccgacgaagtaaaaccaatgcgcaactcccccgcttcaccctgatgcagcctttcagcgcgagcggcagcgtcatccaccatagacaggatttgccgactatctgcaagaaactgttttcctgctgccgtcagcaatacactgcgattggttcgtgccagcagtcgggcaccaatttgttgctccagcgcctgaatctgctgacttagcggcggttgcgaaatattcaggcgggcagcggcgcgcccgaaatgcagctcttccgcaacagcaacaaagtaacgcagatgacgaagttcaatattcatatttaaaacatcttatttgagattattaatatattagacagaacaattcgattttcctaccctatgtataagcctgatctacaggcatatttagcaaggatttcaagtgagccgtactacaactgttgatggcgctccggcaagcgacactgacaagcaaagcatttctcagccaaatcaatttattaaacgcggtacgccgcaatttatgcgcgtcaccctggcgctgttctctgccggactggcaacatttgcacttctctattgtgtgcagcctatccttccggtgctttcgcaggagtttggcttaacccccgcgaacagtagtatttcactgtccatttccacggcgatgttggctattggtttgctgtttactggcccgctatccgatgccattggtcgcaaaccagtgatggtcacggcgctactgttggcctccatttgtacgttactttcgacaatgatgaccagctggcacggcattttgattatgcgcgccttgattgggctttcgttaagtggcgtggcagctgttggcatgacttatcttagcgaggaaatccatcccagtttcgtggccttttcaatggggttgtatatcagcggcaactcaattggcggcatgagcggacgcttaattagcggtgtcttcacggactttttcaactggcgaattgctctggcggcaatcggttgtttcgcgctggcctcggcgttgatgttctggaaaatcctccctgaatcacgccattttcgcccgacttcgctgcgccctaagacgttgtttatcaactttcgtctgcactggcgtgaccggggattaccgttattgttcgcagaaggctttttgctgatggggtcgttcgtcacgctgtttaattacatcggctatcggttgatgctctccccctggcatgtcagtcaggccgtggttggcttattatcgctggcttatttgaccggtacatggagctcacccaaagccggaaccatgaccacccgctatgggcgtggtccagtgatgttgttttcgacgggggttatgctgtttggtttactgatgaccttattcagctcgctgtggctgatctttgccggaatgttactcttctcagcaggattcttcgcagcccactcagtagccagcagctggatcggcccccgcgcaaaacgcgctaaaggccaggcctcctcgctgtatctgttcagttactatctggggtcgagtattgccgggacgctgggtggtgttttctggcataactatggctggaacggcgtcggcgcatttattgctctgatgctggtcattgctctgctggtcgggacgcgtttgcatcgtcgtctgcacgcctgaaaaataagtccggactgcggtaaatacccgtccggacttattgccagctcaaaccaacgttaatagccatcctaaaatagacgaagcgccagccaattcccgcagcgcgtctagcgtcatcaggattataagtacccaaataaacggattcattttgctgtgtgtcatttattactgatgcgcagttattctactgctttgtaagtagtaaaatagttaacccgatcaagactactattattggtagctaaatttcccttaagtcacaatacgttattatcaacgctgtaatttattcagcgtttgtacatatcgttacacgctgaaaccaaccactcacggaagtctgccattcccagggatatagttatttcaacggccccgcagtggggttaaatgaaaaaacaaattgagggtatgacaatgaaaaaagtattagctctggttgttgccgctgctatgggtctgtcttctgccgcctttgctgcagagactacgaccacacctgctccgactgcgacgaccaccaaagcagcgccggcgaaaactacacatcataaaaaacagcataaagcagcacctgcccagaaagcgcaggcggctaaaaagcatcataaaaatacgaaagctgaacagaaagcccctgaacaaaaagcgcaggcagcgaagaaacacgccaagaaacacagccatcagcaaccggcaaaacctgctgcacaacccgcagcgtaagttttcaacagtaatgctggcgcgccccctcgcgcctgaaaattacggtgctaagcgggtaacgtttagcaccgcctttagcggagggtagtatggtgggccgttatcgctttgagttcattctgatcatccttattttatgcgcactgattaccgcccgtttttatctttcctgattgtagttatctgattttactcccactttcatcccgtcccgtctatagtatttatgagggtttgcttttaataatcataattacccaccagagtgtgatatgcgtacaaccattgctgtagtgttgggtgcaattagtttgacgtctgcttttgtgtttgcagataaaccagacgttgccagatcggcaaacgatgaggtcagcaccctgttttttggtcatgatgatcgtgtgccagtgaatgacacgacccaatcaccgtgggatgcggttgggcaactggaaacggccagcggcaatttatgtacggcgacgctgattgcacccaatctggcattaacggcaggacactgtttattgacacctccaaagggtaaagccgataaagcagtggcgctgcgttttgtgtcaaataaaggtctttggcgctatgagatccacgacatagaaggccgcgttgatccgacactgggaaagcggttaaaagcagatggggatggttggattgtacctcccgcagccgcgccgtgggacttcggattgattgtgctacgtaatcccccttctggcattacgccgttgccgttatttgagggagataaagccgcgcttaccgccgcattaaaagcggcaggtcgtaaagtgactcaggcaggctaccctgaagatcatctcgatacgttgtacagtcatcaaaactgtgaagtgactggctgggcgcaaacgtcggtgatgtcacatcagtgcgataccttgccgggtgacagcggttcgcctctgatgttgcataccgatgacggctggcaattaattggggtgcaaagttcggctcctgccgcgaaagatcgctggcgcgccgataaccgggccatttctgttaccggttttcgcgacaagctggatcaactgtcgcaaaaataatgttcaaacgctgcccgacagcgcgggcagcgtcttcatcaggcaagtttcaccatgatcattccagccaacagcaagaccaggccaatccagcctttacgatttaaccgttgaccaaacaagatccaacctgcggctaacgtggcggcaataccaaacccgccccacaatgcataagcgacagacaagtcgatccctttaacggcttgagaaagcgcactaaaggcagccagcaccgccgccagggagagcaagccaaatattttgcgacgaaagccgtcagaaaatttcaaaaagacgttagcaacgatttccagcacgattgccaatgccagccaggcggcgtgaacccattcaaactgcgccatggttcacctccagttcaggtttacgcgctttacgggtacctgattttatcaacacaatcccggcgaccagggtggttaacccggcaattttcatcagcgataaactttcgtcgaataacaaaacgctaaacaaggtaataaataaaataccgataccttcccacagcgcataagctacgcctaaggcgatttttttaacggcgaaagagagaaatatatacgacagagaaatcatcaccagcattaaaataaagccgccatttccctcactgacgctcgcccatttcattgacagcgtaccggtaatttctgtagcaatagccagacctaataaaatccaataaatatacattgtccttctcctgcaagagaattattttaattttcgcttaattcagcgaaaccaaagtaaagtggtcaagccccgcgcatagcgcaagctttggcagaagaaaggactaaagcgcgttgcgccagtgctgctcacctacgagcaagatagtggatgaggtacgaagatgggtaaatgtagaaaataacgtcctgaacaaattgtccataatattacaattatccgcagtgttgcttctcgtcatcgcggatgataattgtcctcggtagttgaacacgcctgatttgtatcatagcttaagaattaactcaaaatattttcacttctttacctgagcggtttgattttcgttatgatgacggagcgaaaaagacattattattagcaaaggaagaaaaaacggggacaagcatggcaaagccgatcatcacgctcaatggcctaaaaatcgtcattatgttgggaatgctggtcattattctctgcggtatccgttttgccgccgagatcatcgtgccgtttattctcgcattatttattgctgttattcttaacccgctggtgcaacacatggtccgctggcgtgtgccgcgtgtactggcggtgtcgattttgatgaccatcatcgtgatggcgatggtgttgctattagcttatctgggttccgcgctcaacgagttgacgcggacgttaccgcaatatcgcaactctattatgacgccgctgcaagcgcttgaaccgttgttgcaacgcgtagggattgacgtctcagttgaccagctggcgcattatattgatccgaacgcggcgatgacgttgctcaccaacttattgacgcagttatctaatgccatgtcatcaatatttttattgctgctgacggtgctgtttatgctgctcgaagtgccacaattgcccggaaaatttcagcaaatgatggcgcgtccggttgaagggatggcggcgattcaacgtgcgattgacagtgtttctcattatctggtgctgaaaacagccatcagcatcatcaccggcctggtcgcctgggcgatgctcgccgcactcgatgttcgcttcgcttttgtctggggattgctggcctttgcgcttaattacatcccgaatattggttcagtcctcgcggcaatcccccctatcgctcaggtactggtgtttaatggcttctacgaagcgttgctggtgctggcgggatatctgctgattaatctggtcttcggcaatattctggagccgcgtatcatggggcgtgggctggggctttccacattggtggtatttttgtcgttgattttttggggatggttgttaggaccggtgggtatgctgctttccgtgccgttgacaattattgtcaaaattgcgcttgaacaaacagcgggaggtcaaagcatcgccgttctgttaagcgatctcaataaagagtgacggcctcagcagaggccgtcagggttacagagctttcaggattgcatccacgctggctttggcgtcaccaaacagcatgtgggtgttttccttgaagaacagcgggttttgcacaccagcatagccagtgttcatcgaacgtttaaagacaatcacgttctgcgctttccacacttccagcacaggcataccagcaatcggactcttcggatcatcctgcgccgccgggttaaccgtatcgttagcaccaatcaccagtacggtatcggtatcagcaaagtcatcattgatctcgtccatttccagcacgatgtcatacggtacttttgcttcagccagcaatacgttcatatgtccaggcaaacgccccgcgaccgggtggataccgaaacgcacattaataccacgagcgcgcaatttctcagtaatttcagcgacaggatattgcgcctgcgcgactgccatgccgtaccccggagtaatgatcactgaatgggagtttttcagcagttccgctgtctcttctgcggtgatttcgcggtgctcacccacttcctgatcatcgccagtagaagagccgtcggtgccgaaaccacccgcaataacgctgataaaggaacggttcatcgccttacacataatgtaagaaaggatagcccccgaagaaccgaccagcgcaccggtcacaatcagcaggtcgttgctgagcataaagcccgcagccgcagccgcccagccggagtacgagttcagcatcgacaccaccactggcatatctgcaccaccgatggaggcgactaaatgccagccgaataccagcgcaattgcggtcattatcagcaatgccagcacttgcaggccgacgctgtccgtgcgaacaaatacaatcagcagcaggaaggaaacgaccagagccgccaggttcattttgtgacggtttggcagcatcaatggtttagacgaaatcttgccacacagtttgccgaacgccaccaccgaacccgtgaacgttaccgccccgatgaagataccgaggaacacttccgtcaggtgaatattgaccagaatcggtgccattcccgcgtcatgatgcagatagctgttaaagccaaccagcactgccgccagacccacgaagctatgcaggatcgccaccagttctggcatttcggtcatttcaactttcttcgccagacggataccaattgccccaccaatgaccatcgccagcaagatccagccaacattacccgtatccggtccaaaaatggttgcgattaacgcaatcgccatcccggcgataccgaagttgttaccctggcgagacgtttcatgtttcgaaagaccggccagactgaagataaacaggatcgcggcaacaatgtatgcagctgtaactaatcctccagacatatgttaccccttaatttttgcggaacattttcagcatgcgctgagtcacggtgaagccaccgaaaatattaatgctggctataagcaccgcgataaaactaaggaagctaacccagccgccctggccaatctgcaacagtgctccgacaacaataatccctgaaatcgcgttggtgaccgacatcaacggtgtatgcagcgcgtgcgatacattccacaccacgtaataaccgacaacgcaggccagcgcgaaaacggtgaagtgcccaaggaattctttcggcgcaacgcttgccatccagccaaaaagaatgattgccagcgccatcaacgcgtatttacgccacggtgagcaggtacatttttcctcagttttcacttccggtgccgctttttgtgccgcctgcggctgagctgatacctgaatcggcggtgccggccaggtaatttcgcccgcacggatcacggtcacgccgcgaatcaccacatcatcaaaatcaacagtgatattgccgtctttctctttgcacaacagtttcagcagattaacgaggtttgtgccgtaaagctgtgaggattgcgtcggcagacggcccggaagatcggtataaccaatcactttgacaccattttccgtagtgaagatttcacccggcacggtgtattcacagttgccgccgttttgggctgccaggtcgacaatcacactgcccgccttcatggagtcaaccatttcacgggtaattagcttcggcgctggtttgcctggaataagcgcggtggtgacaatgatatcgacctcttttgcctgggcggcaaagagttccatttccgctttgatgaacgcgtccgacatcactttggcatagccatcgccgctgccagcttcctctttaaaatccagctcgaggaattccgcgcccatactttgaacttgttctttcacttccgggcgggtgtcgaatgcacgcacaatcgcgccgagactgtttgctgcgccaatggcggccagacctgcaacacccgcaccaatcaccatcacttttgccggtggcactttcccggccgcagtaatttgcccggtaaagaagcgcccaaattcatgtgccgcttcaacaatggcgcgataaccggcgatgttcgccatcgagcttagtgcgtccagcgattgtgcgcgtgagatacgcggcacagagtccatcgccatcacggtcacgttacgttccgcaagtttttgcattaattccggattctgcgcaggccagataaaactcaccagcgttgtcccaggattcagtaacgcaatttcatcatctaacggcgcattgaccttcagaatgatctctgactgccagacgctattcccttctacaatttcagcgcccgcttgcacaaacgctttatcgtcaaaacttgccagttgacccgcgccgctctctaccgcgacggtaaaacccagtttcagcagctgttccactgtttttggcgttgctgcaacacgggtttcattggttaaccgttctcttggtatgccaattcgcatgatattcccttccatcggttttattgatgatggtttgcctgtgtcaggagccacacaagctgctcatgtacgagctaaatgttactccgttaaaataaattagtaacaaacgccctataacgtactgaaaattatgcctgtgatctagcgccaaaaatcagtatttcggcgtgaactcgcaaaatattaacgattcagccgtgatagtgggataaacaccttagaacgccggataaagactgataattgtcttcgacggtcgggtaaaacgagacatcgccccggcacgaatcactacttaacattaaattaacttatacaattcagttgcttcagtagtaatgatgctgatacggctgttttttaagcatagacggtcatttgagcaggattaaaattggcttaaggaatgtgatatgaaaaatgacgcagacagttacaccgtttaaatgcaataatcagccacgtttctcgttaataacaataccagtacctggtttgcgcaaggcgaaggattatttttatgaagcttaagaacaccctcctggcgtcggcactgctttctgctatggcattctccgttaacgcagcaacagaactgacaccggagcaagcggcagcggttaaaccttttgaccgtgtagtggttaccggtcgttttaatgctattggcgaagcggtgaaagccgtttctcgtcgcgcagataaagaaggtgccgcctctttttatgttgtcgacacttctgattttggtaacagcggtaactggcgtgtggtcgctgacctctataaagccgatgctgaaaaagcagaagaaacaagtaatcgcgtaattaacggtgttgtcgaactgccgaaagatcaggctgttctgattgaaccgtttgacacggtcaccgtccagggcttctatcgtagccagccagaagtcaatgatgccatcaccaaagcggcaaaagcgaaaggtgcctactctttctacatcgttcgtcaaatcgatgccaaccagggcggcaaccagcgtattactgcattcatctataaaaaagatgctaagaaacgtatcgtccagagcccggatgtgatcccggcagattccgaagcaggacgtgcagctctggctgccggtggcgaagccgcgaagaaagttgagatcccgggtgttgcgactaccgcatcaccaagttctgaagtcggtcgcttctttgaaacccagtcatcaaaaggcgggcgttacaccgtcacgctcccggatggcactaaagtcgaagaactgaacaaagcgaccgcagcgatgatggtcccgttcgacagcatcaaattctctggcaactacggcaacatgaccgaagtctcctatcaggttgcgaaacgtgccgcgaagaaaggtgctaagtattaccacatcacccgccagtggcaggaacgtggtaataacctgaccgtcagcgcagatctgtataaataactattcagttactcctataaggcggcttgatgccgcctttcgcatttttagtcacaaatttccccgcgaccattgcatgcagacacatctcttcgtaaaatcccgcgcttcagtggcaaactccatttttatgcgttttgccctaatatttattcttcttatcacgttttaatcactggatatcgatggaaaagaaactgggactgagcgcactcaccgcgctggtattaagctcaatgctgggcgcgggtgttttcagtctgccgcaaaatatggcggcagttgccagcccggcagcactgctcatcggctggggtattactggcgctggcattttattgctggcctttgccatgctgatcctcacgcgcattcgtcccgaacttgacggcggtatctttacctatgcccgcgaagggtttggcgagctaatcggcttttgttccgcatggggatactggctgtgcgcagtcatcgccaacgtctcctatctggtgatcgttttttccgcgttaagcttttttacggacacgccggaattgcgcctgtttggcgatggtaatacctggcaatcgatagtcggtgcatcggctttattgtggattgttcactttttgatcctgcgcggggtgcaaaccgctgccagcattaacctggtggcgacactggcaaaattgttgccgctgggtctgtttgttgtgctggcgatgatgatgttcaaactggataccttcaagctcgacttcaccggacttgcacttggcgtacccgtttgggaacaggtgaaaaacaccatgctgatcaccctgtgggttttcattggtgtggaaggtgccgtggttgtttctgcgcgtgcgcgtaataaacgtgatgttggcaaagcgacactgctggcggttctctccgctctgggcgtttacttgctggtaacgctgctttcgctgggtgtggtggcacgtcctgaactggctgaaattcgtaacccgtcaatggccggtctgatggtggaaatgatgggaccatggggcgaaatcatcatcgctgccggtttgatcgtttccgtttgcggcgcgtacttaagctggaccatcatggcagcagaagtaccgttcctggccgccactcataaagcattcccgcgcatttttgcgcgccagaacgcacaagctgcgccatccgcctcactgtggttgaccaacatctgcgtgcaaatttgtctggtactcatctggctgaccggttccgattacaacacgttgctgaccatcgcctcagaaatgattctggtgccctatttcctggtcggcgcgttcttgctgaaaatcgcaacccgtccactgcataaagcggtaggtgtcggtgcctgcatttatggcttatggttattgtacgcctctggtccaatgcacttgctgttatccgttgttctgtatgcaccggggctgctggttttcctgtacgcgcgcaaaacgcatacccatgataatgtactgaaccgtcaggaaatggtgctgattggcatgctgttaattgcctcagttccggcgacctggatgctggtgggataacgttcatcccatcgttggatagcaaaggagataacgatgggtaaaacccagcccttgccaatattaattactggcggaggtcgtcgcatcggcctcgccctcgcatggcatttcattaatcaaaagcaaccggtgattgtcagctatcggacacactatccagccattgatggactgattaatgcaggtgcgcagtgtattcaggctgatttttcgaccaacgacggtgtgatggcgtttgccgatgaagtactaaaaagcacccatggtctgcgtgctattttgcataacgccagtgcgtggatggcggaaaaaccgggtgcgccactggccgacgtactggcttgcatgatgcagatccacgttaataccccatacctgctcaaccatgcgctggaaagattactgcgtgggcacggacacgccgccagcgatatcattcactttaccgattatgtggtggagcgcggtagcgacaaacatattgcgtatgctgcaagcaaagcggcactggataatatgacccgctcgtttgcccgcaagctggcaccggaagtgaaagtgaattctattgcgccatcgctgatcctgtttaatgaacatgatgatgccgaatatcgacaacaggcgctgaataaatcactgatgaaaaccgcgcctggcgagaaagaagtgatcgacctggtcgattacttacttaccagttgctttgtcaccggacgcagtttcccacttgatggcggtcgtcatctgcgttaatgcagctttatccagcatataatcaacacccatgcgcttatcccccaacacgcaacagaaccaacaaaagcggcgggcaagcgcatcattccggtgaaataccacagcgacaccaggtaaacaaaatagggaataatcgaccacatactaaaaatgatggttgcgcgtaaggcttcaatgccgcgttcgctggcaacaatataatgcgcgataagcgcaaaggtcgggaaaagtggaatcagcccggcgatataataatttttcgtttttgctaaaacaccaatcaacagcactaccagcgcaccgagcgcggctttgattaccagccccatctttttaccttaacacttccataacaagtcatcagtagaatacctgatgaaaacttgtttagaaacgattgatagtaagtaaaaacagcgcggtgtattgtgacgtttttatatctaccgtgaatgttatgaacactatcgtatttgtggaagatgatgcggaagtcggttcactgattgccgcgtacctggcaaaacatgatatgcaggttaccgtagagccgcgcggcgaccaggccgaagaaaccattttgcgagaaaatccggatttggtgttactcgacatcatgctaccaggcaaggacggcatgaccatttgtcgtgatttacgcgcaaagtggtctggaccgattgttcttctaacctctctcgatagcgatatgaaccacatcctggcactggaaatgggtgcctgcgactatattctcaaaacgacgccccctgctgttttgctagcgcgtttacgtttgcatttgcgtcagaatgagcaagccacactgaccaaaggtcttcaggaaacgtctctgactccctacaaagccctgcatttcggcacgttgaccatcgatcccatcaaccgcgtagtcaccctggctaacactgaaatctcgctctcgacagctgatttcgaattattgtgggaattagctacccatgccgggcaaatcatggaccgcgatgcattgctgaaaaatttacgcggcgtcagttatgacggactggatcgtagcgtggacgtggctatttcgcggttaagaaaaaaactgctcgataacgccgcagaaccttatcgcattaaaactgtgcgtaacaaaggctatctttttgcgcctcatgcatgggaataagcgatgaaaaaactgtttatccagttttacctgttattgtttgtctgcttccttgtgatgtctctgctggttgggctggtgtacaaatttaccgccgaacgcgcgggcaaacagtcgctggatgatttgatgaacagttcgctgtatctgatgcgcagcgaattgcgtgagatccccccacacgactggggtaaaactctgaaagagatggatttaaatctctctttcgatctgcgtgtcgagccactgagtaaataccatcttgatgatatttccatgcaccgactgcgtggcggcgaaattgtcgccctggacgatcagtacacgtttttgcagcgtatcccgcgcagccactacgtgctggcagttggtcctgttccttatctttattatctccatcagatgcgattgctggatatcgccctgatcgcttttattgctatttccctcgcctttccggtgtttatctggatgcgtccgcactggcaggatatgttaaaactggaagcagcggcgcaacgatttggcgatgggcatctcaatgaacgtatccactttgatgagggttcgagctttgaacgacttggcgtcgcatttaaccagatggcggacaatatcaacgccttaattgccagcaaaaaacagcttattgacggtatcgctcacgaactgcgaacaccgttagtgcgcctgcgttatcgactggagatgagcgataacctgagcgccgccgaatcccaggcgttgaatcgtgatatcagtcaacttgaagctttaattgaagagctgctgacttatgcccgactcgatcgcccacaaaacgagcttcatcttagcgaaccagacctgccgttgtggctgtcaacgcatctggcagatattcaggcagtaacgcccgataaaacggtacggataaaaacgctcgtgcaaggccattatgcggcgttggatatgcgcttaatggagcgcgtgctggataatttgctcaataacgccctgcggtactgccattcaacggttgaaaccagcctgctactgtcggggaatagagcgacattaattgttgaggatgatggcccagggattgccccagaaaaccgcgaacatatctttgaaccttttgttcgcctcgatcccagccgggatcgctcaaccggcggctgcgggctggggctggcaattgtccactctatagcactggcaatgggcggtacggttaattgtgacaccagcgaactgggtggtgcccgcttctcgtttagctggccgttatggcataacatcccgcaatttacctctgcctgacactacgcgcacgatggtcaagtcaccacgactgtgctataaaataagtatgttgtaactaaagtggttaatattatggcgcgttacgatctcgtagaccgactcaacactacctttcgccagatggaacaagagctggctatatttgccgctcatcttgagcaacacaagctattggttgcccgcgtgttctctttgccggaggtaaaaaaagaggatgagcataatccgcttaatcgtattgaggtaaaacaacatctcggcaacgacgcgcagtcgctggcgttgcgtcatttccgccatttatttattcaacaacagtccgaaaatcgcagcagcaaggccgctgtccgtctgcctggcgtgttgtgttaccaggtcgataacctttcgcaagcagcgttggtcagtcatattcagcacatcaataaactcaagaccacgttcgagcatatcgtcacggttgaatcagaactccccaccgcggcacgttttgaatgggtgcatcgtcatttgccggggctgatcacccttaatgcttaccgcacgctcaccgttctgcacgaccccgccactttacgctttggttgggctaataaacatatcattaagaatttacatcgtgatgaagtcctggcacagctggaaaaaagcctgaaatcaccacgcagtgtcgcaccgtggacgcgcgaggagtggcaaagaaaactggagcgagagtatcaggatatcgctgccctgccacagaacgcgaagttaaaaatcaaacgtccggtgaaggtgcagccgattgcccgcgtctggtacaaaggagatcaaaaacaagtccaacacgcctgccctacaccactgattgcactgattaatcgggataatggcgcgggcgtgccggacgttggtgagttgttaaattacgatgccgacaatgtgcagcaccgttataaacctcaggcgcagccgcttcgtttgatcattccacggctgcacctgtatgttgcagattaacgcccggctttcatactgccgaccatctgttctggccgtacccagctgtcaaactcggcttcgctaagataccccagcgcaagggccgcagcttttaaggtcagcccttctttatgcgcttttttggcgatctcggcggctttgtcataaccaatgtgggtgttaagcgcagtcaccagcatcagcgattcattgagtaattgattgattcgctcacgattcggttcaatacccactgcgcagtgtttgttaaaactttccatgccatctgccagcaagcgcaccgattgcaggaaattgtggatcaccattggacggaagacgttcagttcaaagttaccggaagcgccccccatgttgatcgccacgtcgttccccatcacctgacagcagagcatggttaatgcctcacactgtgttgggttcactttccccggcatgattgagctgcccggctcattttccgggattgagatttcaccaattccgcagcgcgggccagaggccagccagcggacatcattggcgattttcatcagtgacgcagccaaccctttcaacgcgccgtgcgcctgaaccagggcatcacaggtcgccagcgcttcaaatttgttcggcgcggtaacaaacggtgcacaggtaatgactgccagttcatctgctacgcgacgcgcatactccggatgggtatttagtccagtacccaccgctgtaccgccaagagccagttccgctacgtgaggcaggctgtattcgatatgtttgagattatgctcgagcatcgctacccagccggaaatctcctgccccagcgttaacggcgtggcatcctgcaagtgagtacgaccaattttgacgatatcggcaaaagcacgggatttctcattcagtgtctgtgtcagggttttaagctgaggaatgagttgcttgcgcagcgccagcagcgccgcaacgtgcatcgccgtcggaaagacatcgttggaactttggcttttgttcacgtcgtcgttagggtgaactttacgttccatcccgcgcacaccgccgagtaattcactggcccggttagccagcacttcgttcatgttcatgttactttgcgtgccggagccggtctgccagatagccagcgggaattcgtcgtcatgctgtcctgccagtacttcatccgccgcctgacgaatggcgctcgctttctcttcagacaacaagcctaaatcttcattaacttttgccgctgcacgcttggttagcgccagcgcatgaatcagtgaggtgggcattttctccgtcgaaatgcggaaatgctccagcgagcgttgagtttgtgcgccccacagcttatctgccgggacatcaatcgcccccatcgaatctttttcgctgcgtactgtattcatgacctgctcctcacctgattaattttttctttctgttttgctttcgttaagcaacttttagctcacttattatttaccatttgataacaaatgtttggtctttcgtgccatgtaaaaaaaccgccccgaagggcggctctgtttatttcacacagcgggtgcattgtgtgagttgtatctgctggaagaagtcatttcctttatcatccacaaggataaacgccgggaaatcttccacttcaattttccagatggcttccattcccagttccggatattcaacacattccaggctcttaatacttccctgcgccaatacagcggccggaccaccgatactgccaaggtagaagccgccgtgttttttacaggcatccgtcacctgctggctgcggttgcctttcgccagcatgatcatacttccgccctgcgcttgcagttgatcgacataagaatccatccgtccggcggtcgttgggccaagagaaccggaggcataaccttccggcgttttggccggacccgcgtagtaaatcggatgatctttgatgtactgcggcagcccttcaccgttatccatccgctctttcagtttggcgtgagcaatatcacgaccgacgataatcgtgccgttaagcgataagcgtgtagaaacgggatactgcgacaactgtgcgaggatctctttcatcggacggttaaggtcaacgcgcaccgcttcgccttctcccgctttgcgcagctcttccgggatatatttgcctggattatgttccagtttttcgatccagatcccctgacggttgatcttcgctttgatattacggtcagcagagcaggagacgcccataccgaccgggcaggatgcgccgtgacgtggcaggcgaatcacgcggatgtcgtgagcgaagtatttaccaccaaactgcgcacccagaccaagattttgcgcttcgatcagcaattctttttccagttccacatcgcggaacgcctgaccgtgctcattcccttccgttggcagttcatcatagtatttcgcggaagccagtttcaccgttttaaggttcgtttctgcagaagttccaccaataacgaacgcaatatgatacggaggacaggccgccgtacccagcgtgcgcatcttctcaaccaggtaatttttcagtttccccggcgtcagtaacgctttggtttcctgatagagatacgtcttgtttgccgaaccaccacctttggcgatacagaggaatttgtattcgtcgccatcaacggcataaagatcgatctgcgctggcagattggtgccggtattcacttctttatacatatccagcggcgcgttttgcgagtagcgcagattatcttcgatataagtgttatagacaccgcgcgccagcgccgcttcatcaccaccaccggtccatacacgctgcccttttttaccaacaataatcgcggtgccggtatcctgacaggttggcagaacgcctttcgccgcgatgtcggagttacgcaggaattgcagcgccacatatttatcattttcgctggcctccgggtcacgcagaatgtcggccacctgttgttggtgcgccggacgcagcatgaacgacgcatcatgaaacgcctggcgcgccaacagagttaacgcttcgggtgcgactttcaaaatctcctgcccttcaaattcagatacgctaacgtgttcgctggttagcaggtaatactcagtatcatcttttttgagtggaaaaggagcctgataatgaaagggtttgtttgacattgttctctcacttactgcctggtttggttatgctctgggcgggtgttccgttgccctgttaaaagcgagtaacaatatcctacacacttttttaacaaaaactgagactagtacgactttttgcggctccaggttacttcccgtaggattcttgctttaatagtgggattaatttccacattaaaacagggattgatcatgcaaaaactcattaactcagtgcaaaactatgcctggggcagcaaaacggcgttgactgaactttatggtatggaaaatccgtccagccagccgatggccgagctgtggatgggcgcacatccgaaaagcagttcacgagtgcagaatgccgccggagatatcgtttcactgcgtgatgtgattgagagtgataaatcgactctgctcggagaggccgttgccaaacgctttggcgaactgcctttcctgttcaaagtattatgcgcagcacagccactctccattcaggttcatccaaacaaacacaattctgaaatcggttttgccaaagaaaatgccgcaggtatcccgatggatgccgccgagcgtaactataaagatcctaaccacaagccggagctggtttttgcgctgacgcctttccttgcgatgaacgcgtttcgtgaattttccgagattgtctccctactccagccggtcgcaggtgcacatccggcgattgctcactttttacaacagcctgatgccgaacgtttaagcgaactgttcgccagcctgttgaatatgcagggtgaagaaaaatcccgcgcgctggcgattttaaaatcggccctcgatagccagcagggtgaaccgtggcaaacgattcgtttaatttctgaattttacccggaagacagcggtctgttctccccgctattgctgaatgtggtgaaattgaaccctggcgaagcgatgttcctgttcgctgaaacaccgcacgcttacctgcaaggcgtggcgctggaagtgatggcaaactccgataacgtgctgcgtgcgggtctgacgcctaaatacattgatattccggaactggttgccaatgtgaaattcgaagccaaaccggctaaccagttgttgacccagccggtgaaacaaggtgcagaactggacttcccgattccagtggatgattttgccttctcgctgcatgaccttagtgataaagaaaccaccattagccagcagagtgccgccattttgttctgcgtcgaaggcgatgcaacgttgtggaaaggttctcagcagttacagcttaaaccgggtgaatcagcgtttattgccgccaacgaatcaccggtgactgtcaaaggccacggccgtttagcgcgtgtttacaacaagctgtaagagcttactgaaaaaattaacatctcttgctaagcttattaaaggcttataacaccttcaggcggccagtccgcctgatttcattttatggataatcattatgaataaatcgctggtagcggtaggcgtcattgttgcgctaggcgtagtctggacaggcggcgcatggtatacaggcaagaagattgaaacccatctcgaagacatggtcgcgcaggcgaacgcgcaactcaaactgacagctcctgaatccaacctggaagtgagttatcaaaactatcatcgcggcgtattcagcagccagttgcaactgttggtgaaacccattgccgggaaagaaaatccgtggattaaaagcggtcagagcgtcatcttcaacgaatcggttgatcatggtcccttcccgcttgcccagcttaaaaaactgaacctgatcccgtcgatggcatcaattcaaaccacgctggttaataacgaagtaagcaaaccactgtttgatatggcaaaaggtgaaacgccttttgagattaactcgcgcattggttacagcggtgattccagttccgatatttcgctcaagccactgaattacgagcaaaaggatgaaaaagtcgcctttagcggcggcgagttccagttaaatgctgacagagacggcaaagccatctccctttccggggaggcgcaaagtggtcggatagacgcagttaacgaatacaaccagaaagtgcagttgacctttaataatctgaaaaccgacggttccagcacgctggcaagttttggtgagcgtgtaggaaatcaaaaactgtcactggaaaaaatgaccatttcagtggaaggcaaagaactggcactgctggaaggcatggagatcagcggtaaatcggatctggtcaatgacggtaaaacgatcaatagccaactggattactcgctaaacagcctgaaggtacagaatcaggatctgggcagcggcaagctgactttaaaagtcggccagattgatggtgaagcctggcatcagtttagccagcaatataacgcgcaaactcaggcgctgctggcacagccagaaattgccaacaaccccgaactttatcaggagaaagtgacggaagccttctttagcgccctgccgctgatgctgaaaggcgatccggtgattactatcgcgccgctaagctggaaaaacagtcagggtgaaagtgccctgaatctgtcgctgttcctgaaagatccggcaacgactaaagaagcgccgcaaacgctggcgcaggaagtagatcgttcggttaaatctctggatgcgaaactgaccattccggtggatatggcaactgagtttatgactcaggtagcgaagctggaaggttatcaggaagatcaagcgaaaaaactggcgaaacagcaagttgaaggtgcatcagcaatggggcagatgttccgtctgaccaccttgcaggacaataccatcaccaccagcctgcaatatgctaacggtcagataacgttaaatgggcagaaaatgtcgttagaagattttgttggcatgtttgcgatgccagctcttaacgttccggctgtaccggcaattccgcagcagtaattcacggccaaaacgccggagaattttcactccggcgttttcatctgaaaacaaaccagagattgcctgatgcgctacgcttatcaggcctaccttttcctgcaacactttgaatttatgagtttttgtaggctggataaggcgtttacgccgcatccggcataaaaaacgcgcactttgtcaacaatctgaaacgccggagatttttctctccggcgttattttttacttcagcataaagtcatactgaatactcattttcacatcccagtaattcaggcgatcgcccagcgtactgccatcgcgcttttcccgccctttatcggcagcaagaaagaaattcatcccttgtaacggcccttcgctgacccgatagttcataccacctaagatacccgtgccttcaatccgcacatctcgtttactggattcatagccgcgagtcacaatcggtgcaaatgtcagcgtaaattgcggcgttaaacgatagttgacgcccaattgccaggactgcattccttcacggttacgatcaagacttaatgaaaagggatagccaatgtcggtatccaccacggcaccattcattgcatggcgcaaataaccaccactgccaaatacacttccccacggcgcattccaggtcaattgtccactaaccaacgccgtttcattgggctggctggtattacgacttaaaccttcgagctgcgcgtaaaagccgagcaactcccctttcaacgtataattcgggtcgagcggtatgcttttctcgagaatactttgtatctgattggaaacatctttctgtaccgatgcccccagagaatagcgactggtatcatcatgccaactggcggctaaaaaagaacgtgcgcgatgtttatcgtattttcccgtctggctgttatacaccccttcatcacgaataccggttgttgaatcagtccataaaaatactcgtgaacgccacattccccacagatcaatatttggtgttaaagcccaataacctaatgctccttcagaaactgtcggtaatgtacgttgcgaactgccagccattaacggaatacgataaggtaagctaccataactataatccgtcccgaagcgacctaatttaagcaggctattttcactgggttttatttttactgcccccagggcaaagccaaaacttttatcaccatcaagataccaccgggtactcatatcagcacgagcacctaatttataaacataatacgccccgccttcaacgccaataatattggaataataaccactattgaaatcgagcaatcctccctgtacccatgcgtaaatatctcttcccgcgccagcactgggcttatccgccctgcgcaattcgtttttcagtctgatgcgtagtcccgcttcatcgtcagccagttgcgccgcataagcagaggtaaggccagaggcagccgtcaggcaaataacggccatggccactatttttctcatagttgcacctttgatgttctgattatttttattgaatattaattagtgatatcgctgattaattgctgctgcacttttttacgattatcaatttcaaccacgatttctttgaattttttatccgtgagcggataaaaccagataataacgaatgccagtagcataaatccgcaaggtactaaggcaattgatgtgcggatgcccataataacttccggcgtttgcacctgattggcgatatatccgcttaaccccaaaataaaggcaggaattgaacctccgattgcctgaccgcatttacgggtaaatgagaatagtgaataggtgagcccttcaattcgcacgccggtcaggtattcaccgtattctacggtatcagcttccagcgcccacatcacggtcatggtaacgccctgaccaattgaagcgatggccaacgcaaccaacgccaccggcagtgaccagacggaaacccagaagaacagcagataaccgcaggttcccagcaaagcgccaatcaggaaggtattctttttaccgatcctcgcgaccatccccggcaccagcggtgccgatgccacagtaccaaccaggttttgcaccagtaccagcacagtgaacagcccggtatcatttaacacatagcgcacgtagaacaacgacgaggcgctgaccgcaaaggtcgaaatcagcacacacagcgcaccgatgcacaacataaacagcgggcgattccgtttcagggtttgcagactgatattcaatgacggctgcgcaacgatacgtaccacattctcacgcgtcgatttgaagcagatgaagtaaagcaccattccggcaatcgccagcacaattgtccagaaatggtataccgacaccatctcttccgggctggagttcttaatgctcggtcctatcagaaatgccaggcagacaaaggtcaatgaagcggcaatcccacgagccgcgcccagacgggcgcgggattgtggttgttgggtcatcgcggtagcaagtgaaccataaggaatattcaccaggctgtagcaaagcccgaggcccatgtaggtcaaatatgcatacaccactttgctaccatggctccagtcggtcagcacccagaataccagcacgctgaagatcattaacggcgcagtaccgaagagtaaaaacgggcggaattttccccagcgggtattcacactgtccaccactcgtccggcaaagacgtcggcgaaggcatcgaatacccgcaccagtaacagcatggtgcccgccgcagcggcaccgacgccagcgacgtcggtgtagtaactcaacaggaagagcgcccccattgcgaaggcgaagttattggcgacgtcaccgaggctgtagccgacgatggtgcgccaggagagttgttgattcattgtttgcctccctgctgcggtttttcaccgaagttcatgccagtccagcgtttttgcagcagaaaagccgccgacttcggtttgcggtcgcgagtgaagatccctttcttgttaccgccaacgcgcaatatgccttgcgaggtcgcaaaatcggcgaaattccatacctgttcaccgacgacggcgctgacgcgatcaaagacgcggtgatacatatccagccatgcacactgatactcttcactccacatgtcggtgtacattgagtgcagcccggctaacgtatccacgccgtattcggtgatgataatcggctgatgcagtttctcctgccaggccagaagttctttttccagtaccttctctgccgtttccaaatcgccgctttggacataccatccgtaataacggttcaggcacagcacatcaaagagatcgctgatggtatcggtgtgagcgtcgcagaacattacattgacgcaggtgatcggacgcgtcgggtcgagtttacgcgttgcttccgccagtggcgcgaaatattcccgtgcaccttgcggacgggtatccggttcgttggcaatactccacatcaccacgcttgggtggtttttgtcacgcgctatcagctctttaatcgcctgtaagtgcgcttgctgagtttccccgttgactgcctcttcgctgtacagttctttcggcttgttgcccgcttcgaaaccaatgcctaaagagaggttaaagccgacagcagcagtttcatcaatcaccacgatgccatgttcatctgcccagtcgagcatctcttcagcgtaagggtaatgcgaggtacggtaggagttggccccaatccagtccattaatgcgtggtcgtgcaccatcagcacgttatcgaatcctttgccacgcaagtccgcatcttcatgacgaccaaagccagtaaagtagaacggtttgtggttaatcaggaactgttcgcccttcactgccactgaccggatgccgacgcgaagcgggtagatatcacactctgtctggcttttggctgtgacgcacagttcatagagataaccttcacccggttgccagaggtgcggattcaccacttgcaaagtcccgctagtgccttgtccagttgcaaccacctgttgatccgcatcacgcagttcaacgctgacatcaccattggccaccacctgccagtcaacagacgcgtggttacagtcttgcgcgacatgcgtcaccacggtgatatcgtccacccaggtgttcggcgtggtgtagagcattacgctgcgatggatcccggcatagttaaagaaatcatggaagtaagactgctttttcttgccgttttcgtcggtaatcaccattcccggcgggatagtctgccagttcagttcgttgttcacacaaacggtgatacgtacacttttcccggcaataacatacggcgtgacatcggcttcaaatggcgtatagccgccctgatgctccatcacttcctgattattgacccacactttgccgtaatgagtgaccgcatcgaaacgcagcacgatacgctggcctgcccaacctttcggtataaagacttcgcgctgataccagacgttgcccgcataattacgaatatctgcatcggcgaactgatcgttaaaactgcctggcacagcaattgcccggctttcttgtaacgcgctttcccaccaacgctgatcaattccacagttttcgcgatccagactgaatgcccacaggccgtcgagttttttgatttcacgggttggggtttctacaggacgtaacataagggactcctcattaagataataatactggtcaacctttaatctgattagttaaccaattctgtgttgcacacagttatctgtgagaaacccatggaagagaaatggaaataaaaagaactgacaccgcgatcaaaaaaccaaaaactgcaatacccacagcgtgatatagatcgcattaatctttaaaacagcgttgacagaagccataaaataagcaaccgaacgttcgttcgagcgtattgggaacgataaactctcatgacatatggctacagtgaatattttggggggaattctccgaagccgggaaggataatttttgcacagagaaattacgatatgaaacgcgggcacagttatcaccagcccgccgaaaaagagagagaatcaggatgcggttaagataccgccaatcatcgcgcgtaatccctgagcaaacgacgcttcacgcgccaggtcttccgcttcgatatcggccagtacaccgtaggtcagatccagcagtaaacgtgaagtcattgccgtgttgatgtctgggcttatctcgcctttttgctgggcatcacgcatccgctgggcaacaaattccgtgatcgtcatatgcttatttttaagcatggcggcgacctgtgggttacgcatcccttccgccataatttcaaccaccagcgcccgttgtccaaaggcttcatgggtgagagagacaatggactcgaccatatagtcaacgaaatgaatcccttcaatcggttcccggaaacgggccagcgccctctcctggtcctgtaagataatcgcctgaatcaaggcttctttggagatgaaatggtgatagagcgtcccgggactaatggcgcaagatttacagatggctttcatcgaggcactgtgaaatccattttctgaaaaaatctctctggcagcattgaggatccgggtccgtgtcggttgtgcttcagtctgcatgttatccatcattaaaccattatagttagcgtgaataactagtttaccgcgttgtcaggtgagcgcctatcattgctgttgaatagtgcgaaggcacactctattcgtatacttttcactctgaaattggttaaccaatagccgtgatttggctgccagttatttagcagagacgttgatgagtttatcccggtaaacaacacgcacggttgtttaccggtccgttagtgtattaattgagctcctgtaccccaccaccggagacggtgagaatttgtccgcttacccagctcgcagcaggcgagcaaaggaacagcgctgcgttagcaatatcttgcggttggcccagacgtctgatcggcgtgtgctgtaacattttttgttcaatttctggtgtaataacggatttcagggcatcggttaatattgcccccggcgcaatgccatttacccgaatatttttttcacccaggtcaaacgccatatttctgaccagatgactggccgcagctttagatgatgcataggaagtcatgtttatatttttattttctgccgccatagaagtgatggtcagaataacgccaccgccatttttttccatttctggcgcaacaagttgtgacagatggaaaaaagaaaacacattcagttcataagcacggcgaaaatccgccattggcatatcaaacggtttaggtccaccgccaccggcgttgttaaccagaatatcaactttacccagcttactgatagcaaagtctgccagtgcagagagttcctgttcggaagtaatatcacaacggcaggcaaatgcctgaccacccagttgttgaatttcgtctacaacatggttagctgcgtcggcgttaatatcactgaccaccacagatgcgccagctgtcgcgaatgtaatggcgatttctttaccaatacctgcacccgcacctgtgatgatggcgcattttccgtcgagtctcaggttgtcagaattaaacacataaacctcctgtgaacttcagtaaaaataaaaggcaccgcctgtgtgccacattttttatcattaaccttgaggaaaggacactaccaggtatagcagataaagagaggattatttcgctgcaatgagccgggcgggaataataagattgcgtgaatgcgtctcttcatgggtgattttttgcatcatgcgatccgcaagtgtgataccaagttcccgcgctggcgtgctggcccaggtaacaggtatatcatcaagtgtggttggtgtcgcatcggtaaatgccgccagcgaaacctgttgctcaaagtaacgatcgactccgctttccccgctttgccgccctgctttgagcaaaccaaaccatgcccccatcgcaatagtttcgttatagcaaaccacggcactgatggtcgggttatgacgtaaaagcgccgtgatagcttccgcggcttgcttctggctggaagtgcactccaacacccaatcgctatgaaacggcaggccaaattttagtagagttgcacaatagcccccaacccgttctgcacgggttaatgaggaactttgccctcccagccaggcgatccgctgatgcccattgcgaatgagatgctccgtcaacaactgtgcagcctgcatgttgtccgggcgaaccgtatcaacatcatcaagataactggcacgggaagcgaaaatcaccgggatagctttttcttctgccatccgtcgcaggtcatcgctacttcctgcagctccggcaattaccacaccatcgacaccctgattcagtaacagtgaaaaccgctgtgccagctgctcaccgtctttaccgccgtgaagcaaaaaaaccatccgtccctgcgcttccagagcttccgtcaatccggccgtcaattcggcgtaaaacggcgcagataaatcacggacgatcaaaccaatgacgccgctttgcccgccgcgcagcgccgacgcctggcgattgcgcacaaatcccagctcttcaatggcggcgttaacgcgttctcctgtggcggtagagattcgccctttgccactaagcaccagcgaaacggtacttaccgacacgcccgcagccagcgcaacatcatgaatggttatttttttggcggtagccatgcagatgacctactccctgattatgtgacagataaaacgttttaccttttatttatcttatacccgctattatcgttgcgtaatgtgatttatgcctcactaaaatttgataaaacgttttatcttctcgcgcaatttactgaatccagattgttctctacgaggagtcgttttatgacggcgaaaacagcaccgaaagtcacgctgtgggagttcttccagcagttaggcaaaaccttcatgttacccgtggcattattgtcgttctgcggcattatgctcggcattggtagttctcttagcagccatgatgtcataaccctgatcccggtcctgggcaaccccgtgttgcaggctatctttacctggatgagtaagattggctcgtttgcttttagtttcctgcctgtcatgttctgtatcgccatcccgctgggcctggcacgcgaaaataaaggcgtagcggcattcgctggcttcatcggttatgcggtaatgaacctcgcggtaaacttctggttgaccaataaaggcattctgccaaccacggatgccgcggttctgaaagccaataacatccagagcattcttgggatccagtcgatcgataccgggatcctcggtgcggtgatcgccggtattatcgtctggatgctgcatgagcgtttccataatatccgcctgccggatgcgctggcattcttcggcggtacgcgcttcgtaccaattatctcctcgctggtgatgggccttgtcggcctggtgattccattagtctggccgattttcgccatgggtattagcggcttgggccatatgataaacagcgcgggtgatttcggaccgatgctgtttggtaccggtgaacgtctgctgttgccgtttggtctgcatcacattctggtggcattaattcgctttaccgacgcaggcggcacgcaggaagtctgcggtcaaaccgtcagcggcgcactgaccatcttccaggcgcaattgagttgcccgaccactcacggtttttctgaaagcgccacgcgtttcctttcgcaaggtaaaatgcctgcgtttctcggcggtctgccaggtgcagcgttagctatgtatcactgcgcgcgcccggaaaatcgccataaaattaaaggtctgctgatttctggcctgatcgcctgcgtcgttggcggcactaccgaaccgctggaattcctgttcctgttcgtagcgccagttctgtatgtcatccacgcgctgttaaccggcctcggcttcaccgtcatgtctgtgctcggcgtcaccatcggtaataccgacggcaatatcatcgacttcgtggtgttcggtattttgcatggtctgtcaaccaagtggtacatggtgccagtggtggcggcaatctggtttgtcgtttactacgtcatcttccgtttcgctatcacccgcttcaatctgaaaaccccggggcgcgatagcgaagttgccagctcaatcgaaaaagccgttgccggtgcgccgggtaaatcaggttacaacgttcctgcaatcctcgaagcattaggcggtgccgacaatattgtcagcctcgataactgcattacccgtctgcgtttgtctgtgaaagatatgtcgcttgttaatgtgcaggcactgaaggacaatcgggcaattggcgtagtacaacttaatcaacataacctgcaggttgttatcgggccacaagttcagtcagtaaaagatgaaatggccggtctgatgcatactgtccaggcataaggataagatatgttcgatttttcaaaggtcgtggatcgtcatggcacatggtgtacacagtgggattatgtcgctgaccgtttcggcactgctgacctgttaccgttcacgatttcagacatggattttgccactgccccctgcattatcgaggcgctgaatcagcgcctgatgcacggcgtatttggctacagccgctggaaaaacgatgagtttctcgcggctattgcccactggttttccacccagcattacaccgccatcgattctcagacggtggtgtatggcccttctgtcatctatatggtttcagaactgattcgtcagtggtctgaaacaggtgaaggcgtggtgatccacacacccgcctatgacgcattttacaaggccattgaaggtaaccagcgcacagtaatgcccgttgctttagagaagcaggctgatggttggttttgcgatatgggcaagttggaagccgtgttggcgaaaccagaatgtaaaattatgctcctgtgtagcccacagaatcctaccgggaaagtgtggacgtgcgatgagctggagatcatggctgacctgtgcgagcgtcatggtgtgcgggttatttccgatgaaatccatatggatatggtttggggcgagcagccgcatattccctggagtaatgtggctcgcggagactgggcgttgctaacgtcgggctcgaaaagtttcaatattcccgccctgaccggtgcttacgggattatagaaaatagcagtagccgcgatgcctatttatcggcactgaaaggccgtgatgggctttcttccccttcggtactggcgttaactgcccatatcgccgcctatcagcaaggcgcgccgtggctggatgccttacgcatctatctgaaagataacctgacgtatatcgcagataaaatgaacgccgcgtttcctgaactcaactggcagatcccacaatccacttatctggcatggcttgatttacgtccgttgaatattgacgacaacgcgttgcaaaaagcacttatcgaacaagaaaaagtcgcgatcatgccggggtatacctacggtgaagaaggtcgtggttttgtccgtctcaatgccggctgcccacgttcgaaactggaaaaaggtgtggctggattaattaacgccatccgcgctgttcgttaaccccaattgcgcaacgtaaaaaatcgttgcgcaatcgtggatttttaccctgctttgtttttataatggtgcgcacttttatatccagaaaaagagtgcgaccatgattgataccaccctgccattaactgatatccatcgccaccttgatggcaacattcgtccccagaccattcttgaacttggccgccagtataatatctcgcttcctgcacaatccctggaaacactgattccccacgttcaggtcattgccaacgaacccgatctggtgagctttctgaccaaacttgactggggcgttaaagttctcgcctctcttgatgcctgtcgccgcgtggcatttgaaaacattgaagatgcagcccgtcacggcctgcactatgtcgagctgcgtttttcaccaggctacatggcaatggcacatcagctgcctgtagcgggtgttgtcgaagcggtgatcgatggcgtacgtgaaggttgccgcacctttggtgtgcaggcgaagcttatcggcattatgagccggaccttcggcgaagccgcctgtcagcaagagctggaggcctttttagcccaccgtgaccagattaccgcacttgatttagccggtgatgaacttggtttcccgggaagtctgttcctttctcacttcaaccgcgcgcgtgatgcgggctggcatattaccgtccatgcaggcgaagctgccgggccggaaagcatctggcaggcgattcgtgaactgggtgcggagcgtattggacatggcgtaaaagccattgaagatcgggcgctgatggattttctcgccgagcaacaaattggtattgaatcctgtctgacctccaatattcagaccagcaccgtagcagagctggctgcacatccgctgaaaacgttccttgagcatggcattcgtgccagcattaacactgacgatcccggcgtacagggagtggatatcattcacgaatataccgttgccgcgccagctgctgggttatcccgcgagcaaatccgccaggcacagattaatggtctggaaatggctttcctcagcgctgaggaaaaacgcgcactgcgagaaaaagtcgccgcgaagtaacaaaatggatggtgcaaatgcaccatccatttttcatgcaaggcacaaagtcgcgcgatgtttggcggattcgatgcccagctcaatcaactccattacctggattgcctggcttgccggaaccggattttcaccatcgccatttaacgcatcacgaatagccgcatagtaagccggataattcccaggcaccgtcaacagcgtttcttcgacacgttcctcaccttccacgcgggtaagtacgccatcacgcatatcgtagccccagtcttcctgcggtagacgctcgccatttttcagacgttcttcctgtggatcgaggccatatttcacataactgcctcgggatccatgcacgatataccgtgctgactcagcggctgccagcatggtaccgtgtaaaatgactcgccgctgtggataggacaagatggcgtggaaataatcggtcgactgcgctccgggccgtaactgtgccaaatctaccgtcatgctgaccggtaaaccaaaaagcgtaatggcctgatcaagaagatgtggtgctaaatcgtaccagataccgctgcctgggccgccctgttcacgccaacgatcgcgcacctgcggacggaagcggtcaaaatgagactcaaagtaagcaacttcacccagcacgccttccgcgagtaaaccttttagcgtcaagaaatcgctatcccagcgacggttatggaatacagacagcacacgccccaggctttttgccagcgcatccagctctcgcgcttgtgacagtgtcacggtaaagggtttatcaacgaccacatgtttacccgcctcaagcgccgctttggctaacgggaaatgggtatcgttgggtgtaggaatgacaatcaggtctatgttgggatcgttaaacagatgcttcggctcagagacaaccgtaaccgttggccagtcggcttttacttttgtttcatcactgctggagattaccgccagttcctgcccgggcgtgcccgcaatcaggggcgcatggaaggttttgctcgcataaccatacccaatcaacccaacacggatgttgtcgctcatgtcattgcctctcattgaagtatgatggctatttgacactatcctttacccacgctcaacagtttaataacctgccagcaataagggatgttgtttaacttaagtcaaaaaaatagcgaattttccaacgacaaaagctaaatatcgcaaaaacctcagtaaaaatcttgctggagctattattgctaagtaacatttaccccctgaagttaatggatcaatcaagagagatgtgggctgtaatgaatcgtcttattgaattaacaggttggatcgttcttgtcgtttcagtcattcttcttggcgtggcgagtcacattgacaactatcagccacctgaacagagtgcttcggtacaacacaagtaagctctgcacttgtggagcgacatgctgcccgtccgggtgcatgttttcacttgtcggatattaaaccaggaatttattatcttgttcgatgttgttggtgattgtcagggatagtaaagcgcgttactcttttcagagcagtttttcatccctgaatatttgccatcagcgcattcttattattgtaataacacaagcgttcacttttggtgaaattttatcatcactaataatacctacccctttggtattaattattttatggaccttttatgactgttcaggactacttattaaaatttcgcaaaatcagttcactcgaaagtctggaaaaactctacgaccatcttaattacaccctgacggacgatcaggaactgatcaatatgtatcgtgctgccgatcaccgtcgcgcagagctggtttctggcgggcgtttgtttgacctcggccaggtaccgaagtccgtctggcactatgtccaataaagaaagtagcgatcggttataaaagccttataataacgcccctaaaattagatttgcctgtttgcgtcgctattctggagaacctatgaccaccacaacgccacaacgtattggaggctggttgcttggcccgttggcctggcttttagtcgctctgttgagtacgacgctggcgttgttgctgtataccgctgcgttatcttctccgcaaacatttcaaacgctcggcggacaagcactgacgacacaaatcttatggggcgtttcttttattaccgctatcgccttgtggtattacacactgtggttgaccatcgctttctttaaacgtcggcgttgtgttcctaaacactatattatctggctgcttatttccgtattgctggcagtaaaagcattcgctttttcacccgtggaagatggcatagccgttcgccagttgctgtttactttgttggcaaccgcattgatcgtcccctatttcaaacgctcgtcgcgggtaaaagcgacgtttgtgaatccgtaataaccttacagttaacctgttgtcgcctgctctggattaacggataataggcggcttttttatttcaggccgaaaaatgactgactacctgttactgtttgtcggaactgtactggtcaataactttgtactggtcaagtttctcggtctctgtccgtttatgggggtttccaaaaaactggaaaccgcgatgggcatggggctggcaacaacgtttgtgatgacgctggcgtctatttgcgcctggcttatcgatacgtggattttgatcccacttaatctgatttacctgcgcaccctggcatttattctggtgattgctgtggtcgtgcagttcaccgagatggtggtgcgcaaaaccagcccggtgctttaccgtctgctggggatttttttgccgcttatcaccaccaactgtgcagtgctcggcgtggcgttgctgaatatcaatctcgggcacaatttcttgcagtcggcgctgtacggtttttccgccgctgtcggtttctcgctggtgatggtgctcttcgccgccatccgcgaacgccttgctgtggctgatgtcccggcaccttttcgcggtaatgccattgcgttaattaccgcaggtcttatgtctctggcctttatgggctttagtggtttggtgaagttgtaatgaatgctatctggattgccgttgccgccgtgagcctgctgggcctggcgtttggcgccattctgggttatgcctcccgccgttttgcggtggaagacgatccggtcgttgagaaaattgacgaaatcttaccgcagagccagtgtggtcagtgcggttatcccggctgtcgcccctacgcggaagccatcagctgtaacggtgaaaaaatcaaccgttgcgccccaggtggcgaagctgtgatgctaaaaattgccgagttgcttaatgtcgagccgcagccgctggatggcgaagcgcaagagataacgcctgcgcggatggtggcggttattgatgaaaataactgtattggctgcactaaatgtattcaggcgtgtccggtagacgccatcgttggcgctacccgtgccatgcatacggtaatgagtgatctctgtacgggctgcaatttatgtgttgatccgtgcccgacgcactgcatctcgttgcaaccggtcgcagaaacacctgactcctggaaatgggatctgaacaccattcccgtgcgtatcattcccgtggaacaccatgcttaagttattctctgcattcagaaaaaataaaatctgggatttcaacggcggcatccatccaccggagatgaaaacccagtccaacggtacacccctgcgccaggtacccctggcgcagcgttttgttattccactgaaacagcatattggcgctgaaggtgagttgtgcgttagcgtcggcgataaagtattgcgcggccagccgcttacccgtggtcgcggcaaaatgctgcctgttcacgcgcccacctcgggtaccgttacggctattgcgccccactctacggctcatccttcagctttagctgaattaagcgtgattattgatgccgatggtgaagactgctggatcccgcgcgacggctgggccgattatcgcactcgcagtcgcgaagagttaatcgagcgcatacatcagtttggtgttgccgggctgggcggtgcaggattcccgacaggcgttaaattgcagggtggcggagataagattgaaacgttgattatcaacgcggctgagtgcgagccgtacattaccgccgatgaccgtttgatgcaggattgcgcggctcaggtcgtagagggtattcgcattcttgcgcatattctgcagccacgcgaaattcttatcggcattgaagataacaaaccgcaggcgatttccatgctgcgcgcggtgctggcggactctaacgatatttctctgcgggtgattccaaccaaatatccttctggcggtgctaaacaattaacctacattctgaccgggaagcaggttccacatggcgggcgttcatccgatatcggcgtattaatgcaaaacgtcggcactgcttatgcagtgaaacgtgccgttattgatggcgagccgattaccgagcgtgttgtaaccctgactggcgaagcaatcgctcgcccgggcaacgtctgggcacggctggggacgccagtgcgtcatttattgaatgatgccggattctgcccctctgccgatcaaatggtgattatgggtggcccgctaatgggctttaccttgccatggctggatgtcccggtcgtaaagattaccaactgtctgttggctccctctgccaatgaacttggcgaaccacaggaagaacaaagctgcatccggtgtagcgcctgtgctgacgcctgccctgcggatcttttgccgcaacagttgtactggttcagcaaaggtcagcaacacgataaagctaccacgcataacattgctgattgcattgaatgtggggcttgcgcgtgggtttgcccgagcaatattcccctggtgcaatatttccgtcaggaaaaagctgaaattgcggctattcgtcaggaagaaaagcgcgccgcagaagccaaagcgcgtttcgaagcgcgccaggctcgtctggagcgcgaaaaagcggctcgccttgaacgacataagagcgcagccgttcaacctgcagccaaagataaagatgcgattgctgccgctctggcgcgggtgaaagagaaacaggcccaggctacacagcctattgtgattaaagcgggcgaacgcccggataacagtgcaattattgcagcacgggaagcccgtaaagcgcaagccagagcgaaacaggcagaactgcagcaaactaacgacgcagcaaccgttgctgatccacgtaaaactgccgttgaagcagctatcgcccgcgccaaagcgcgcaagctggaacagcaacaggctaatgcggaaccagaacaacaggtcgatccgcgcaaagccgccgtcgaagccgctattgcccgtgccaaagcgcgcaagctggaacagcaacaggctaatgcggaaccagaagaacaggtcgatccgcgcaaagccgccgtcgaagccgctattgcccgtgccaaagcacgcaagctggaacagcaacaggctaatgccgagccagaacaacaggtcgatccgcgcaaagccgccgtcgaagccgctattgcccgagccaaagcgcgcaaacgggaacagcaaccggctaatgcggagccagaagaacaggttgatccgcgcaaagctgccgtcgaagcggctattgcacgcgccaaagcacgcaagctggaacagcaacaggctaatgcggtaccagaagaacaggttgatccgcgcaaagcggcagttgccgcggctattgcccgcgctcaggccaaaaaagccgcccagcagaaggttgtaaacgaggactaaatggtattcagaatagctagctccccttatacccataaccagcgccagacatcgcgcattatgctgttggtgttgctcgcagccgtgccaggaatcgcagcgcaactgtggttttttggttggggtactctcgttcagatcctgttggcatcggttagtgctctgttagccgaagctctcgtactcaaactacgcaagcagtcggtagccgcaacgttgaaagataactcagcattgctgacaggcttattgctggcggtaagtattccccccctcgcgccatggtggatggtcgtgctgggtacggtgtttgcggtgatcatcgctaaacagttgtatggcggtctgggacaaaacccgtttaatccggcaatgattggttatgtggtcttactgatctccttccccgtgcagatgaccagctggttaccgccacatgaaattgcggtcaacatccctggttttatcgacgccatccaggttatttttagcggtcataccgccagtggtggtgatatgaacacactacgcttaggtattgatggcattagtcaggcgacaccgctggatacatttaaaacctctgtccgtgccggtcattcggttgaacagattatgcaatatccgatctacagcggtattctggcgggcgctggttggcaatgggtaaatctcgcctggctggctggcggcgtatggttgctatggcagaaagcgattcgctggcatattcccctcagcttcttagtaacgctggcgttatgcgcaatgttgggctggttgttctcaccagaaacactggcagcaccgcaaattcatctgctgtctggagcgaccatgctcggcgcattctttattttgactgacccggttaccgcttctacgaccaatcgtggtcgtcttattttcggcgcgcttgcgggcttattagtctggttgatccgcagtttcggcggctatcctgacggcgtggcttttgccgtcctgctggcgaacatcacggttcctctgatcgattactacacgcgtccgcgcgtctacggccatcgcaaagggtaaaccatgctgaaaactatccgaaaacacggcattacgttggcgctatttgcagcgggttcaacagggttaactgcggccatcaaccagatgaccaaaacgacgattgctgaacaggccagtctgcaacaaaaggcgttatttgatcaggtgctgccagccgaacgctataacaatgcgctggcacagagttgctatctggtaactgcgccagagttaggtaaaggtgagcatcgggtttacatcgccaaacaggatgacaaaccggtagccgccgttctggaagcaaccgcgccagatggctattccggtgcgattcagctgctggtgggagccgattttaacggcacggtacttggcacgcgcgtgacagagcaccacgaaacgccagggcttggcgataaaatcgaactgcgcctttctgactggatcacccattttgcgggtaaaaaaatcagtggtgcagatgatgcgcactgggcggtgaagaaagatggtggtgatttcgaccagttcaccggcgcgacgattactccccgcgcggtggttaatgcggtaaaacgcgccggattgtacgctcagacgttaccggcacaactttctcaacttcctgcctgtggagaataaagcgtgagcgaaattaaagacgttattgttcaggggttgtggaaaaacaactctgcgctggtccagttgctcggcctttgtcctctgttggcggtcacgtccactgccactaacgctctgggtttaggacttgcgactacgctggtactgacgctgaccaacctgaccatttcgacgctgcgtcactggacgccagccgagatccgcattcccatttacgtgatgatcatcgcctcggtggtcagcgctgtacagatgctgatcaacgcctacgcctttggcctgtatcaatcattagggatttttattccgctgattgtcactaactgtatcgttgtgggccgcgctgaagccttcgccgccaaaaaaggtccggcgctttcggcactggacggcttttcaattggtatgggcgcaacctgcgccatgttcgtgctgggttcactacgcgaaattatcggcaatggcacattgtttgacggtgcagatgcgctgttaggtagctgggcaaaagtattacgcgtggagattttccacaccgactcccctttcctgctggcgatgctgccaccaggtgcatttattggcctgggactgatgctggcaggaaaatacctgattgatgaaagaatgaaaaagcgccgtgctgaagcagctgcagaacgtgcattgccaaacggtgaaacagggaatgtctgatgaataaagcaaaacgcctggagatcctcactcgcctgcgtgagaacaatcctcatcccaccaccgagcttaatttcagttcgccttttgaattgctgattgccgtactgctttccgctcaggcgaccgatgtcagtgttaataaggcgacggcgaaactctacccggtggcgaatacgcctgcagcgatgcttgaactgggcgttgaaggggtgaaaacctatatcaaaacgattgggctttataacagcaaagcagaaaatatcatcaaaacctgccgtatcttgctggagcagcataatggcgaggttccggaagatcgtgctgcgcttgaagccctgcccggcgtaggtcgtaaaacagccaacgtcgtattaaacactgcattcggctggccgactattgctgtcgacacgcacattttccgcgtttgtaatcgtactcaatttgcgccggggaaaaacgtcgaacaggtagaagaaaagctactgaaagtggttccagcagagtttaaagtcgactgccaccattggttgatcctgcacgggcgttatacctgcattgcccgcaagccccgctgtggctcttgtattattgaagatctttgtgaatacaaagagaaagttgacatctgaagaaaaggggtaacaccgattaccccattgataacctttctttatcctcttttaaaacatctttttaacgtcaatgatgccattgcttagcgttatcatcaggtaatccgtttgcggataaccaaaaatgcaggttaattgtttttttaatagcgaaattttctattcattcgtgatcaagatcacgatgctgtcgcaatgtaaaaacattgcaagaatcaggttaaaatcatttaaatttacacacgcaacaaatattgacctacaaaacattacactggctatttttcagaaactggactatctcactagtaaaaacgctaaatagcagaacatatcgccgttaagccatcacccccctctcagtgcagtgaaaaaatctgccgttacgttttttgaaaaatttaacgctggataacatttcccggaatggttgaattccccgcctcagttatatgtaacagattattacaaaggacttgtctgaaagtgcaagatagtgaacattacctgccgtttcccctcccactataacaattgcgcgtatgttttttatacataacgcgagaaagcacccccgttaatatgggatgtaaaaaaagaggtaaaagtgtccactgcaaaccaaaaaccaactgaaagcgtcagtttgaacgctttcaaacaaccgaaggcgttctatctcatcttctcgattgagttatgggaacgttttggttattacggcctacaaggaattatggctgtttacctggttaaacaactgggtatgtctgaagcggattcaatcacccttttctcttcctttagtgccctggtttatggtctggtcgctatcggcggctggttaggtgacaaggtactgggtactaaacgcgtaattatgctcggcgctattgtgctggcgattggttatgctctggttgcctggtctggtcacgacgccggtatcgtttatatgggtatggcggctattgcggtcggtaacggcctgtttaaagctaacccgtcttctctgctttctacatgctatgagaaaaacgacccgcgtctggacggtgcattcaccatgtactacatgtccgtcaacatcggctctttcttctctatgattgctacgccgtggctggccgcgaaatacggctggagtgttgcgtttgcgttgagcgttgtaggcctgctgatcactatcgttaacttcgccttctgccaacgctgggttaaacagtacggttcaaaaccagacttcgagcctatcaactaccgtaacctgctgctgaccattattggtgttgtggcactgatcgctatcgccacctggctgctgcacaatcaggaagttgcgcgtatggcgctgggcgttgttgccttcggtatcgtggttatcttcggtaaagaagccttcgcgatgaaaggtgctgcgcgtcgtaaaatgatcgttgccttcatcctgatgctcgaagccattatcttcttcgtgctgtacagccagatgccaacgtcactgaacttctttgcgattcgtaacgttgagcactccattctgggtctggccgtagaacctgagcagtatcaggcactgaacccgttctggatcatcatcggtagtccgattctggccgctatctataacaagatgggcgataccctgccgatgccaaccaagtttgcaatcggcatggtgatgtgttctggtgcgttcctgattctgccgctgggtgcgaaattcgcgtctgacgctggtatcgtgtctgtaagctggctggtcgcaagctatggcctgcagagcatcggggaactgatgatctctggtctgggtctggcaatggttgctcaactcgttccgcagcgtctgatgggcttcattatgggtagctggttcctgaccactgccggtgcaaacctgattggtggttatgttgcgggtatgatggctgtgccggataacgttaccgatccgctgatgtcactggaagtctatggtcgcgtattcttgcagattggtgtcgctactgccgttattgcagtactgatgctgctgaccgcgccgaaactgcaccgcatgacgcaggatgacgctgcagacaaagcggcgaaagcagccgtagcgtaaaattcagggaaactcttttacaagccgctaacttttcgttagcggctttttttttgttcagcaacgcactaccatactttaaaccacagacaaaaggagttaccgatgaaattgttctacaaaccgggtgcctgctctctcgcttcccatatcaccctgcgtgagagcggaaaggattttaccctcgtcagtgtggatttaatgaaaaaacgtctcgaaaacggtgacgattactttgccgttaaccctaaggggcaggtgcctgcattgctgctggatgacggtactttgctgacggaaggcgtagcgattatgcagtatcttgccgacagcgtccccgaccgccagttgctggcaccggtaaacagtatttcccgctataaaaccatcgaatggctgaattacatcgccaccgagctgcataaaggtttcacacctctgtttcgccctgatacaccggaagagtacaaaccgacagttcgcgcgcagctggagaagaagctgcaatatgtgaacgaggcactgaaggatgagcactggatctgcgggcaaagatttacaattgctgatgcctatctgtttacggttctgcgctgggcatacgcggtgaaactgaatctggaagggttagagcacattgcagcatttatgcaacgtatggctgaacgtccggaagtacaagacgcgctgtcagcggaaggcttaaagtaatagccatcggcccacaggtcgttgtgggccgaaatgagatatttcagagctttgttgcgctgaagtaatgttctggtttggcaatacgatcctgagcagccaccacttgcagctcatattcctgcattgctttggtggtcaccatgatttcgtagactgcagcggtcacatgttccagcgcctcctgcagcgttgccccctgaagcagtttcaccagcagtaaaccgctcgtcacatcaccaacacctaccggctggcgcataccaaaatccaccagcggacggctgatatgccaggcttcatcggcggtgaccagcagcatttcaaaacggtcacggctgtagccagctcgcgccaggtgtttaaccaacacaatttgtggcccttgcgcaatgagttcgcgcgctgccagaaccgcttcttcgacgttatttaccgcatgctcacagagtatttccagctcaaccagatttggcgcaatgatatcgctggcaggcaaaccgtgccgcacatgaaactctgcgacacccggtgcaacgatacagcctttttccggatgacccattaccggatcgcaaaaatatttcgcctgcggattcgcggctttcacctgacggacgataccgaggatatgttcaccctgctccgccgatcccagatagccacttaatacggcatcacaggtgtgtaatttatcaatggcggcaatgccttgcacaatttcggttaaatggctgggcggcatcacgcagccagtccatttgccgtattgggtgtgattagaaaattgaacggtgttcagcggccagacgttcgcgcccaggcggcgcatcggaaactctgccgcactgttacccgcatgaccataaacaacgtgagactggatagcgagaatatttttcatcatgttccctgtataaaaaccagggggagtgatttctcactccccctttccacttaatgcattatttccagcaaatcagacagtaattctttttaccgcgacgcagtaaggtaaaacgaccaaacagacgatcttcttctttaaagaagtattcaggatcggactgtttttcaccgttaatggtgatggcattggaggcgatagttttacgtgcctgaccacgggaaggttgcagttcagaatcgaccagtgcctgcatcaggtctgcgcccttttccatctcaaccatcggtacgccgtcctgcgccagctgttcgaagtccgcttcactcagcgcactcaaagaaccgctgaacaggcattcggtaatacgttttgccgcctgtaaaccttcttcaccgtgaaccagacgagtcacctgctccgccagtacatactgggcgcgcggtgctttaccgctgtttttatcttcttcttccagggcgttgatctcttcaatgctcataaaggtgaagaacttcaggaagcggtaaacgtcggcatccgcagtgttgatccagaactggtagaatttgtacgggctggttttcttcggatccaaccagactgcgccgccttcagttttaccaaatttggtgccatctgctttagtgatcagcggaacggtcaggccaaacacctgattctgatgcagacgacgggtcaggtcgataccagaagtgatgttaccccactggtcagaaccaccaatttgcagcaccacaccgtactgtttgttcagacaggcgaagtcataaccctgcaacaggttgtaggaaaactcagtgaacgaaatcccctgatcttcacggttgagacgctgcttaaccgcttctttgttgatcatctggttaacggagaagtgtttgccaatatcgcgcaggaaggtcagcacattcatattgccgaaccagtcatagttgttcgccgcgatagcagagttttctccacagtcgaaatcgaggaacggggcaacctgcttacggattttgtccacccactcctgaacagtttcttcggtgttcagcttacgctcggcagctttgaagctcgggtcgccaatcagacccgtcgcgccgcctaccagcgcaaccggcttgtggcccgcctgctggaagcgtttcaggcataacaatggaacaagatgccccaaatgcaagctgtcagcggtaggatcgaagccgcaatagagcgcgatcgggccttgcgccagtcgctctgctaacgcttcctcgtccgtcacctgggctaccagcccccgctcttgcaattgtttaatcaagttactgcttgccatcaaaatctccatgtatataacgactgcacctttgccggtacacgacttttcgccagatgcgaaagagacatagaataaagtgccagaatcaggagtaccagcgattaaagcaagatttttgcatcttttcagggtgcaagacgatcaatcttccacgcatcattttcacgctggtacaaaaagcggtcatgcaggcgatgctcaccaccctgccagaactcaatctgttcaaggctgacgcgaaaaccgccccaaaagctcggcaatggcacttcgccctgttgaaacttctgcttcagctccaggaatttactttcaaggataccgcgggcagaaatgcgactggactgcttcgaaacccatgcaccaatctggctatcacgcgggcggctatgaaaatatttcatcacttcgagagtcgaaagtcgttctgctttaccgatcaccatcacctggcgctcaagggtatgccacgggaacagcaggctaacgcgcggattattttcgatttgatgtgctttacggctgccgaggttggtgtaaaacaccatgcctttttcgtcgtaatgtttgagtaaaacgatgcgctgataaggctgaccatgttcatccacggtagcgaccaccatcgcggtagggtccgccagtttggcttcacaagcctgagagagccaacgttcaaaaagggttaatggatcggcgggaagatcgcggcggcgtaacccgcctttggtgtattcacggcgcagatgcgcgatttgctgcaattcgtcgttatcagacatggttttctttacggattgtcagtgggtgacgctattgtgcgccgcccctggaaaaatctcaacgctgtggattttgtaactgacagttattcaagacgatgcggtcgcgtttatagacagtcgcttcatcgcctttcgaccagaaaacatagattccgtcagtgtaacgcgcgccagaggctgaaatgccctgtttgagatgcagtagttgattatcgtaaacaaaactgacctcctggcgcggattattcagtttgaccgtcaacggtttttcatcacactggtattccagcgtatcggtttgcatgcgctcaaccagctgattaaaggcgctacagccggagagaaggaccggcaaaatgataattaacagttttttcatagtcatatcccgaagactttcctggtctggagggcaatacgccctccctaacgttccaagtgtaacggcagacgcggtaagaaaaattcagttaactctgatatcacgggttagcggggaaaatagcccccagtaccgtctcctggcttgcgccagtgacggaaggcagatttcctggtaatcccgccagcgtccgccaggcaagccaggcgaaagccaatgcttccatgtcatcgccactaatgccaacggcatcggtggtggtgacttctgtgcctggcagtaatgccgccagacgcgccatgagtagcggattacgactacctccaccacataccatcaatcgttcgcagccaccgctcaacaaaacttgttcagaaatggtcacggcggtgagttctgccagtgtcgcctgcacatctcggggatcaacacccggaaaatggcgcaaatggcgctccagccaaccatagttaaagtattcgcgtccggtgcttttcggtgcaggttgcgagaaatacgggtcgctgagcatattttgcagcagtgggagaataactttacccgcccgtgcccactcggcatctttatcgtaaggtttaccggcctgacgccagatccaggcatccatcagcatgttaccaggaccggtatcgtagcccccaaccggctgcccaggaatgagcagtgacagattggcgatgccgccaatattgagcaccattcgtcgctcggttgggtgagccagcagcgcatgatggaacgcaggtaccagcggtgcgccttgtcctcccaaggcaatatcgcgacggcgaaaatcaccgacaaccgtaattccggtgcgtgccacaatttgattgttatcgccaatctgtaaagtgtgtggtgccacgcccgtcggttcatgccagacggtttgaccgtgacaaccgatcgcaactatatctcttgcctgcagattttgttccttaagcaaggcattgaccgcatcagcaaaaagttgcccgagttgagtatcaagctgtccaaactgcgaaagtgtaagctgctggccctggcaaatatccagtacagcctgtttcagagataccgggatcggccaactcaaacttgccagctgtgcgacccggtgttcatcaattgtcgccaacacaacatcaacaccatcaaggctggtgcctgacataacgccaataaagcggcccgatttcatagttcatcctttttcaatctgacgtttgcgcaccactcaaacataaacttttcgtgaataccatgcggaatgaccgatttttaccgttggtagtaaaacattatcttcaaatcaataatcatcatgaatgttttgtttataattggttgatcctactttcattatgatttgctcatatttggtagaacatgtaaccatggattcacatatgccatatactttgaccatgagggatgcttgcgtggcgtttcatggtgaacaggagatttttcaatgattaaacgcgtattggttgtttcaatggtaggtctgtctcttgtcggttgtgttaataacgacaccctgtcaggggatgtttataccgcttctgaagcgaaacaagtacagaatgtcagctatggcaccatcgttaacgtacgtccggtacagattcagggcggtgatgattccaacgttatcggtgcaattggcggtgctgttcttggtggtttcctggggaatactgttggtggcggaaccgggcgttctctggctactgcagcaggcgctgttgcaggtggcgtagctggtcagggcgtacagagtgcaatgaacaaaacgcagggtgtcgagctggaaattcgtaaagacgatggtaataccatcatggtggtacagaaacaaggcaacactcgtttctctccgggccaacgtgtcgtactggccagcaatggcagtcaggtgaccgtttctccgcgctaaataagtttgcgtgtggtcaggttactgaccacacgcccccttcatttcaccctttggcctgtaactcaatgatattatgctcaagttttgcgatgagcgtaatcagttgctccagttcctctgcggagatgccatgtaatatttccgcgcgggttttgttaataacagcttccatttcgctgatcagcggctctgccttttccgtcagtttaatacgtttagcccgacgatcgctggcacaagtttgacgcgaaattaaccctttttcttccagttggtccagagtacggaccagtgatggctgctcgatgccaatcgcttttgccagttgaatttgcgactggtctggaggtaactgatggatattgtgtaacgtaacccaatgggtttgtgttaactccagcggtttcaggcgatggtctatcagagcacgccatatgcgcaccaaccgtgccagatcagaacctagtggcgattccaatttcatctccttataattagcttgctaagatattatgcggcttttagaatagtgtgcagcaattgtattgctaaaacaaatgtattgctgcatttggttaccgtcagacatatttttcagaaattgcgcgtaaatttttcgcacttaaagaatatttattaatctaacgcaatatattcggtcgtaaaggaatctactttgtgaagtttatgctcaatgcaacaggattgcccttacaagatctggtgttcggtgcgtccgtctactttcctccgtttttcaaagcattcgcgtttggattcgtcatctggcttgtcgtacaccgcctgcttcgtggctggatctacgccggtgacatctggcatcccttgttaatggatttatcgctgtttgcgatttgcgtttgccttgctctggcaatactgattgcgtggtaactatgtcaattaaaacaattaagtatttctcaacaatcattgtagcggtagttgcggttcttgccggatggtggctgtggaattattacatgcaatctccgtggacacgcgacgggaaaatacgcgcagaacaggtttctatcaccccacaggtgtcgggacgtattgttgagctgaatataaaagacaaccagctggttaacgcgggggatcttctgctcacgatcgataaaacgccctttcagatcgccgagctgaacgcacaggctcagctggcgaaagcgcaatctgacctcgcaaaagccaataacgaagcgaatcgtcgtcgtcatctctcacaaaattttatttctgccgaagaactcgataccgctaacctcaatgttaaagcgatgcaggccagtgttgatgccgcacaggcgacgctgaaacaggcacaatggcaactggcgcaaacggaaattcgcgccccggtgagtggatgggtgactaaccttactacccgcatcggcgattacgctgataccgggaaaccgctgtttgcccttgtcgacagccactcgttttacgtcattggttattttgaagaaaccaagttgcgccatatccgcgaaggtgcaccagcacaaattaccctctatagtgataacaaaacgttacagggtcacgtttccagtatcggtcgggcgatttatgatcagagcgttgaaagtgactcaagccttattccggatgttaaacctaacgtcccctgggttcgactcgcccaacgcgttcccgtccgctttgcgctggataaagtcccaggcgatgtcacgttggtgtcgggcaccacctgtagcattgccgtaggtcaataatgaacgcatcgtcatggtccttgcgcaatttgccctggttcagggccacgctggcgcaatggcgttatgcgttacgcaataccattgccatgtgtctggcgctgacggttgcctattatttaaatctggatgaaccctattgggcgatgacctcggctgcagtggttagctttcccaccgttggcggtgttatcagcaaaagcctcggacgcatcgctggcagtttgctcggagccattgcggcactgcttcttgccgggcatacgctcaatgagccgtggttttttctattgagcatgtcggcgtggcttggcttttgtacctgggcctgtgcgcacttcacgaataacgtcgcgtatgcatttcaactggcgggctacacggctgccatcatcgcctttccgatggttaatattactgaggccagccagctgtgggatatcgctcaggcgcgcgtttgcgaggtaatagtcggtattttgtgcggcggcatgatgatgatgatcctgccgagcagttccgatgctactgcccttttaaccgcattgaaaaacatgcacgcccgattactggaacatgccagtttactctggcagcctgaaacaaccgatgccattcgtgcagcacatgaaggggtgattgggcagatactgaccatgaatttgctgcgtatccaggctttctggagccactatcgttttcgccagcaaaacgcgcgccttaatgcgctgctccaccagcaattacgtatgaccagtgtcatctccagcctgcgacgtatgttgctcaactggccctcaccgccaggtgccacacgagaaattctcgaacagttgctgacggcgctcgccagttcgcaaacagatgtttacaccgtcgcacgtattatcgccccgctacgcccgaccaacgtcgccgactatcggcacgtcgccttctggcagcgactacgttatttttgccgcctttatctgcaaagtagtcaggaattacatcgtctgcaaagcggtgtagatgatcataccagactcccacggacatccggcctggctcgtcataccgataacgccgaagctatgtggagcgggctgcgtacattttgtacgttgatgatgattggcgcatggagtattgcttcgcaatgggatgccggtgccaatgcattaacgctggcagcaattagctgcgtactctactccgccgtcgcagcaccgtttaagtcgttgtcacttctgatgcgcacgctggtgttactttcgctattcagctttgtggtcaaatttggtctgatggtccagattagcgatctgtggcaatttttactgtttctctttccactgctggcgacaatgcagcttcttaaattgcagatgccaaaatttgccgcattgtgggggcaactgattgtttttatgggttcttttatcgctgtcactaatcccccggtgtatgattttgctgattttcttaacgataatctggcaaaaatcgttggcgtcgcgttggcgtggttagcgttcgccattctgcgtccaggatcggatgctcgtaaaagccgccgccatattcgcgcgctgcgccgggattttgtcgatcagctaagccgccatccaacactgagtgaaagcgaatttgaatcgctcacttatcatcacgtcagtcagttgagtaacagccaggatgcgctggctcgccgttggttattacgctggggtgtagtgctgctgaactgttctcatgttgtctggcaattgcgcgactgggaatcgcgttccgatccgttatcgcgagtacgggataactgtatttcactgttgcggggagtgatgagtgagcgtggcgttcagcaaaaatcactggcggccacacttgaagaattacagcggatttgcgacagccttgcccgtcatcatcaacctgccgcccgtgagctggcggcaattgtctggcggctgtactgctcgctttcgcaacttgagcaagcaccaccgcaaggtacgctggcctcttaattacttaattacaccacaggcatagcgttcaccgccaccgcccagcggtttaggttgatcggacatattatcgccgccaacgtggaccatcagcgctttgtctttgatttcatccagtgatttcagacgaggcgcgatgacggcatcggtagctttgccgtcattattgacgaccagtgcaggcagatcgcctaaatgcccggcaccttctggcccttcatgtttaccggtattttgtggatcaagatgcccgcctgcggattccgcggcgctggctttgccatctttggtggctggctggcagcttcctttggcatgaatatggaagccatgttcaccggggggtaatgctttcagatcgggcgaaaactccagacctttatcggtttcagtaatggtgacgctaccaattgactgccctaccccttgcgacgtgacgaggttcatctcgactttttcactggcagcttgtgcgccggttgcaacaaccagcgccagaatagccagactaaaacgtttcataggacctccgttcattgtgcattcctgaataagtgtaaaccagtgacacatttttgaacggcggctattcctaaaagtgcttacggtacgtcgtaccccagtgccgctttacggatacgaaaccattgttgacgggtcattttcagtgtttctgcttcgacagctgcccgtacgcgctcaattttacctgaaccgataattggcagcggctgcgatggtaaacgtaatacccaggcgtaaaccacctgttcaatcgagcccgcgtttaactcctctgccaccacagccagttcatcacgcagcggctggaaataatcatcattaaacagacgaccaccaccaaggcaggaccacgccatcggacgaacacgcagttgttgtagttggtcgagcgtgccatccagcagtaacggctgatgcaccggggatatttccacctgattagtggcaagggtaaacggcagacgtgattgcaacagggcaaattgcgcaggcgtaaagttcgatacgccaaaatgacgcactttgccgctctgatgcagatgtttgaacgcgtccgccacttcatcggcatccattaacgggtctggtcggtggattaacagcaaatccagatgatcggtcgcgagattaattagcgactgttcggcgctcttaatgatgtgatcgcggtcagtgatgtaatgaccaatgacgttttcttcacgcgcggtcgtcgcgataccgcatttactgacgatttccatccgttcacgcaggtgaggtgccagtttcagtgcctcgccaaacgccgcttcgcactgatagccaccataaatatcagcatggtccacggtggtcacgccgagatccagatgctcttcaataaaactgaccagctggcgggcggacatattccagtccatcaatcgccagtagcccatcacaaaacgggaaaactccgggccttgcggcgcaatagtaatacgctgaaccataatcgcttcctcttatcagatatgagaggagtatacgcaagattaggttcaaaagagtgatggttgctccggttcgtctgatgacgctggcttatttgcgcgtaatttgcgcattaatcgctgccgacaaaggcgcagcacctcttgtttttcgccatcgctcattttattccagttaaaacgctcatcacgactacgaaaacagccgcgacaaaacccgcgttcgtcagactggcaaattccccggcacgggctctggacgggaaagaactctaattgctccgccacttcgccctcctcagataagattattaccattattgaagctgttaatgtccaaagtagcaactttgcttgcactagaccgactggtctactacactccaacgcatgaacaaacacaccgaacatgatactcgcgaacatctcctggcgacgggcgagcaactttgcctgcaacgtggattcaccgggatggggctaagcgaattactaaaaaccgctgaagtgccgaaagggtccttctatcactactttcgctctaaagaagcgtttggcgttgccatgcttgagcgtcattacgccgcatatcaccagcgactgactgagttgctgcaatccggcgaaggtaactaccgcgaccgcatactggcttattaccagcaaacactgaaccagttttgccaacatggaaccatcagtggttgcctgacagtaaaactctctgccgaagtgtgcgatctgtcagaagatatgcgcagcgcgatggataaaggtgctcgcggcgtgatcgccctgctctctcaggcgctggaaaatggccgtgagaaccattgtttaaccttttgtggcgaaccgctgcaacaggcacaagtgctttacgcactgtggcttggcgcgaatctgcaggccaaaatttcgcgcagtttcgagccactggaaaacgcgctggcccatgtaaaaaacattattgcgacgcctgccgtttagcaggcattttttatcaccagacgaccgggagcctttatgtcatctgaaaaactgtattccccactgaaagtgggcgcgatcacggcggcaaaccgtatttttatggcaccgctgacgcgtctgcgcagtattgaaccgggtgacattcctaccccgttgatggcggaatactatcgccaacgtgccagtgccggtttgattattagtgaagccacgcaaatttctgcccaggcaaaaggatatgcaggtgcgcctggcatccatagtccggagcaaattgccgcatggaaaaaaatcaccgctggcgttcatgctgaaaatggtcatatggccgtgcagctgtggcacaccggacgcatttctcacgccagcctgcaacctggcggtcaggcaccggtagcgccttcagcacttagcgcgggaacacgtacttctctgcgcgatgaaaatggtcaggcgatccgtgttgaaacatccatgccgcgtgcgcttgaactggaagagattccaggtatcgtcaatgatttccgtcaggccattgctaacgcgcgtgaagccggttttgatctggtagagctccactctgctcacggttatttgctgcatcagttcctttctccttcttcaaaccatcgtaccgatcagtacggcggcagcgtggaaaatcgcgcacgtttggtactggaagtggtcgatgccgggattgaagaatggggtgccgatcgcattggcattcgcgtttcaccaatcggtactttccagaacacagataacggcccgaatgaagaagccgatgcactgtatctgattgaacaactgggtaaacgcggcattgcttatctgcatatgtcagaaccagattgggcggggggtgaaccgtatactgatgcgttccgcgaaaaagtacgcgcccgtttccacggtccgattatcggcgcaggtgcatacacagtagaaaaagctgaaacgctgatcggcaaagggttaattgatgcggtggcatttggtcgtgactggattgcgaacccggatctggtcgcccgcttgcagcgcaaagctgagcttaacccacagcgtgccgaaagtttctacggtggcggcgcggaaggctataccgattacccgacgttgtaatccaacattgcgagcggcgtaaagccgccgctatactaaaacaacattttgaatctgttagccattttgaggataaaaagatgcgtcttcttcataccatgctgcgcgttggcgatttgcaacgctccatcgatttttataccaaagtgctgggcatgaaactgctgcgtaccagcgaaaacccggaatacaaatactcactggcgtttgttggctacggcccggaaaccgaagaagcggtgattgaactgacctacaactggggcgtggataaatacgaactcggcactgcttatggtcacatcgcgcttagcgtagataacgccgctgaagcgtgcgaaaaaatccgtcaaaacgggggtaacgtgacccgtgaagcgggtccggtaaaaggcggtactacggttatcgcgtttgtggaagatccggacggttacaaaattgagttaatcgaagagaaagacgccggtcgcggtctgggcaactaatctcctgccgggcgtgaactcatcgcgcccgcatctttactgcatcgacaagtaatatttgtcataatgcgcgctgcaatttatccgtattaagagaatcagatgtccgataacgctcaacttaccggtctgtgcgaccgttttcgtggtttttatcctgttgtgatcgatgttgaaacagccggatttaacgccaaaaccgatgcgctgcttgagattgccgccatcaccctgaaaatggatgaacaaggctggctgatgccggacaccacattacatttccacgtcgaaccatttgtcggcgcaaatttgcaaccagaagccctcgccttcaacggcattgacccgaacgatcccgatcgcggcgcggtcagcgaatacgaggcgctgcacgaaatttttaaagttgtacgtaaaggtattaaagcgagcggctgtaaccgcgccattatggtggcgcacaatgccaattttgatcacagctttatgatggccgccgcagaacgcgcctcactgaaacgtaacccgttccaccctttcgccacttttgacactgctgcactggccgggctggcactcggacaaaccgtattgtcaaaggcttgccagaccgctggcatggacttcgacagcacccaggcgcactccgcgctgtacgacaccgaacgcactgctgtgctgttttgtgaaatcgtcaaccgctggaaacgtctgggaggctggccgctatctgccgccgaagaggtgtaatcgagtcgatgcctgatgacatgcaatgattcaggcatctatagtgaggctattccacgcatcctgcatgatattcacggggaatagcgttaatggcagataatccagacccttcatcgctcctgccggacgtgttttcaccggcgacccgcgactggtttcttcgcgcctttaaacagccgaccgctgtccagccgcaaacctggcatgtggcggcgcgaagcgaacatgcgctggtgattgcaccgaccggctccgggaaaacgctggcagcatttctctacgccctcgatcggctcttccgcgaaggcggcgaagatacccgcgaggcgcataagcgtaaaacctcacgcatcctctatatttcaccgataaaagccctgggcaccgacgttcagcgcaacttgcagatcccgttgaagggtattgccgatgaacggcggcggcgcggcgaaacggaagtcaatcttcgcgtagggatccgtactggcgatacgcctgcacaggaacgcagcaaactcacccgtaatccgccggatattctgatcaccacacccgaatcactctatctgatgctgacctcccgcgcgcgcgaaacgctacgcggcgtcgaaacggtaattattgatgaagtccacgcggtagcgggcagtaaacgtggtgcgcatctggcgttaagtctggagcggctcgatgcgctgctccacacctcagcacagcgaattggcctttctgccactgtgcgctcagccagcgatgtggcagcatttcttggtggcgatcgcccggttacggtagtcaacccgcccgcaatgcgccatccgcagatacgaattgtcgtaccggtcgccaatatggatgatgtctcatcggtcgccagcggcaccggcgaagacagccatgccggccgggaaggctccatctggccatatattgaaacgggtatccttgatgaagtgttgcgccatcgctcgaccattgtctttactaattcgcgggggctggcggaaaaactgacggcacgattaaatgagctttacgccgcacgcttacagcgttccccgtctatcgccgttgatgcggcccatttcgagtcgacctccggcgcaacctctaaccgtgtacaaagtagcgacgtttttattgcccgctcacaccacggctccgtctctaaagaacaacgagcaatcaccgaacaggcgctgaaatcgggtgaattacgctgcgtggtcgcaacctccagtcttgaactggggattgatatgggcgcggtggatctggtgattcaggtggcaacgccgctttctgttgccagtgggttacaacgcattggtcgcgccggacatcaggttggcggtgtatctaaagggctgtttttcccccgtacccggcgtgatttagtcgattccgcagtcattgtagagtgtatgttcgcaggcaggctggaaaacctgacaccaccgcataatcctctcgacgtccttgcgcagcaaaccgttgccgccgcggcgatggatgcattacaggtagacgaatggtactcccgcgtacgccgtgccgcaccgtggaaagatctgccaagacgtgtttttgacgccacgctggatatgctttccgggcgctatccctctggcgatttttctgcttttcgccccaaactggtctggaacagggagaccgggatattgaccgcccgacctggcgctcaattgttggcggttaccagcggcggcaccattccggatcgtggcatgtatagcgtgttattacccgaaggtgaagaaaaggccggttcgcggcgggtgggtgaactggatgaggagatggtatatgagtcgcgggtgaacgacattatcactctcggcgctacctcatggcggatccagcaaatcacccgcgatcaggtgattgtgactcctgctccgggtcgttctgcccggctccccttctggcgtggtgaaggtaacggacgtccggctgaattaggcgagatgatcggcgattttcttcatttgctggcggatggcgcgttcttttccgggactattcccccgtggctggcagaagaaaatacgatcgccaatattcaggggttgattgaggagcagcgcaacgcgacgggcatcgttccggggagtcgccatctggtcctcgaacggtgccgtgatgaaattggtgactggcgtattattttgcactctccctatggaagacgggtgcatgaaccctgggcggtggcgattgccgggcgaatacatgcgctatggggcgctgacgcgtcggtggtcgccagtgatgacggcattgttgcacgtattcctgacaccgatggtaaattgcccgatgccgcgatttttttgtttgaaccagaaaagttgctgcaaattgtccgcgaggcggtaggcagctcggcacttttcgccgcccgttttcgcgaatgcgccgcgcgggcattattaatgccggggcgcactccgggccatcgcaccccgctttggcaacaacggctgcgcgccagtcagttgctggaaatcgctcagggatatccggattttccggtcattctcgaaaccctacgcgaatgtctgcaagatgtttatgatcttcccgcactggaacgtttgatgcgtcgcctgaacggtggcgaaattcaaatatccgatgtaacgaccactacgccctcgcctttcgccacaagtttattgttcggctatgtcgcggaatttatgtaccagagcgacgccccgctggcagagcgccgggcatccgtactgtcgctggacagcgagttactgcgcaatctactcggacaggtcgatccgggggaattactcgacccgcaggtcattcgccaggtggaagaagagttgcaacgactggctcctggcagaagagcgaaaggtgaagaaggattgttcgacctgctgcgcgaactggggccaatgaccgttgaagacctggcgcaacggcatacaggcagcagtgaagaggttgcgtcgtatctggaaaatcttcttgcagtaaaacgaatcttcccagcgatgattagcggacaggagcgtcttgcctgtatggatgatgccgccaggctgcgtgatgccctcggcgtacgactaccagagtcattgccagagatttatttacatagagtcagttacccgcttcgcgacctctttctgcgctatctccgggctcatgctctggtcacggctgaacaactggctcatgagtttagtctcggtattgccattgtcgaagagcagcttcagcaactgcgtgaacagggtctggtgatgaatctgcaacaagacatctgggtgagcgatgaagtatttcgtcgtctgcgtttgcgctcgctgcaagccgccagagaagcgacgcgtcccgttgcagccacgacctatgcgcgattgctgctggaacgtcagggcgtattacccgccaccgatggtagcccggcgctctttgcctcaacatcgccaggcgtttatgagggcgtagatggcgtgatgcgggtgatcgaacagcttgccggagtcggtttacccgcctcactctgggaaagccagatcctgcctgcccgcgtacgcgactattcgtcagaaatgctcgatgaattactggcaaccggtgcggttatctggtcggggcaaaaaaaactgggtgaagatgacggcctggtggcactgcatctacaggaatatgctgcagaatcgttcactcccgccgaagcggatcaggcgaatcgttcggcgctgcaacaagcgatagtcgctgttctggctgacggaggagcctggtttgcacaacaaatcagccaacggatacgcgacaaaatcggcgaatcggttgatctctctgccctgcaagaggcgttatgggcgctggtctggcaaggcgtcatcaccagcgacatttgggcaccgttacgcgccctcacccgcagcagttccaacgcacgcacctcaactcgccgcagtcaccgggctcgtcgtggacgtcctgtctatgcgcaacccgtctcgccgcgggtatcttacaacacaccaaatctggctggacgctggtcgttattgcaggtggagccactaaacgataccgaaaggatgctggcgctggcggaaaatatgctcgaccgctacggcatcatcagtcgtcaggcggtgatagccgaaaatatccctggcgggtttccatcgatgcaaacgctttgtcgaagtatggaagactccgggcgaattatgcgaggtcgttttgtagaaggtctgggtggcgcgcaattcgctgaacgtctgactattgaccgattgcgcgatctggcgacacaagccacgcaaacgcgccactatacaccagtggcgctctctgccaacgatccggctaatgtgtggggaaatcttctgccctggcctgcacatccggcaacgctggttccaacgcgtcgggcgggtgcgctggtggtcgtttctggcggcaaattgttactctatctggcgcaaggtggcaaaaaaatgctggtctggcaggaaaaagaggaattactcgccccagaggttttccacgcgctgactaccgcactgcgtcgcgaaccacggctgcgctttacgctaacagaagtgaatgatctaccggtccggcaaacgccgatgtttacgctgctgcgtgaggcgggattttcaagttcgccacaagggctggattggggatagagaaaggactgacggatgcccgttcgcatccgtcagtattgcaggacggattattccgcgtccggctcttcagacttgtatttagcggcagtttctttgatcagctgctgcagttcgccacgctgatacatttcgatcacgatatcacaaccgccgaccagctcgccgtcaacccacagttgcgggaaggtcggccagttagcatatttcggcagttccgcacgaatgtccggattctgcagaatatcaacataggcaaaacgttcgccacatgcggcaagcgcctggactgcctgggcagagaaaccgcagctcggcagtttcggtgaacctttcatgtacagcaggatcgggttttcagcaatctggcgttggattttttcgatagtggtgctcattgtcttgcttcctcaaacttctttacggcagtaatctgacattgtagcgggtcagtgcggcatcggaaaataacattttcatcacgcttttgctattttatccctttgctctatttgttgcatttcaaatattcgtttcttctctgatgccggcaaactggcgtatttataaccatttttagctttcactgctgcatttttttgcgctcgccaacgaaacgtattttttaacaataaaagctattaactttctcttcttctatgcattagaatcatcaagttttgtaaatcagacgcaggcatgatagacctgcctttacagagggacgctcagtggcgcggataaaccgtatttcgatcacgctctgtgctttactttttaccaccctgcctttaacgcctatggcccatgcttcaaagcaagccagggagagttctgctaccactcatatcaccaaaaaagcagataaaaagaaaagcacggcaaccaccaaaaagacccagaaaacagcgaaaaaagccgccagtaaaagtacgaccaaaagcaaaaccgcttcttccgttaaaaaatcttccattaccgcttctaaaaacgccaaaactcgcagcaaacacgccgtcaataaaacggcctcagccagctttaccgaaaagtgtaccaaacgtaagggctataaatcgcattgtgtgaaagtcaaaaatgccgcgtcaggaactcttgccgacgcgcacaaagcgaaggtgcaaaaagctacgaaagtggcaatgaataaactgatgcagcaaattggtaagccatatcgttggggtggcagctcaccgcgtaccggttttgattgcagcggcctggtttattacgcttataaagatttggtgaaaattcgtattccgcgtacggcgaatgaaatgtatcacctgcgtgatgcagcgccaatcgaacgtagtgaactgaaaaacggcgacctggtctttttccgtactcagggacgcggcacagccgatcatgtcggcgtgtatgtcggcaacggcaaatttattcagtcaccgcgcacaggtcaggaaattcaaatcacttctctcagtgaagactactggcagcgccactatgttggcgctcgtcgggtaatgaccccaaaaacacttcgctaaaactttaccctgttgttacggcaacagggtaagttcatcttttgtctcaccttttaatttgctaccctatccatacgcacaataaggctattgtacgtatgcaaattaataataaaggagagtagcaatgtcattcgaattacctgcactaccatatgctaaagatgctctggcaccgcacatttctgcggaaaccatcgagtatcactacggcaagcaccatcagacttatgtcactaacctgaacaacctgattaaaggtaccgcgtttgaaggtaaatcactggaagagattattcgcagctctgaaggtggcgtattcaacaacgcagctcaggtctggaaccatactttctactggaactgcctggcaccgaacgccggtggcgaaccgactggaaaagtcgctgaagctatcgccgcatcttttggcagctttgccgatttcaaagcgcagtttactgatgcagcgatcaaaaactttggttctggctggacctggctggtgaaaaacagcgatggcaaactggctatcgtttcaacctctaacgcgggtactccgctgaccaccgatgcgactccgctgctgaccgttgatgtctgggaacacgcttattacatcgactatcgcaatgcacgtcctggctatctggagcacttctgggcgctggtgaactgggaattcgtagcgaaaaatctcgctgcataataactgatggcaaatgcagcattgcctgaagcgctacgcttatcaggcctacgcggatcatcgatgtaggtcggataaggcactcgccgcatccggcaagataaatcgcacgttgtcagcaactgtaacgcagaaggttatccttctgcgtttttgtttaattagctgttagcaacgcaaactgtttcaggttgttttctggctgacataaacaccagcaataatgccagtcccgcgacaatcgctcccatcaccggcacaaagctgtatcccagcccagcggaaattaccgcaccaccagcagctgctcccagcgcatttccaagattaaaggcaccaatattgactgatgaagacagacctggcgcttcactggcgacacgcatcacgcgcatctgtaacggcggtacgaccgcaaaggttgctgcgccccacaccaccatgctaatagctgcgccgaactcattgcgggccaggaacgggattgccagcataatcaccatcaacaacaacaaaaagcctttcaacgtgccgttaactgaacgatctgccagtttgccgccgagatagttaccgatagagaatccgacaccaatcagcaccagcattgccgtgacgaacaccggtgttgcgtgggtaatactttgcagtaccggagagatataggtgtagagagtaaacattgcaccagctcccagtaccgtcgtcagcaatgcagacagcacctgcggacgcattaataccgccagctcttttttcacttcaggtcgtgcccctgcaccacctttaggtaatgagaagaacagacttaccattgaaatcactcccagccccgccgttgccagaaatgacatccgccagccgatggtttcacccaaccaggtcgccgccggcacgccaccgatatttgccagggttaaccccataaacatagtggcaactgcgctggcctgtttatgttttggcaccacgcttgcggccacgactgaacccaaaccaaaaaatgctccgtgattcaggctggtcaaaatgcgtgaaagcatcagggtcatataatccggcgcgatggcggaaagtacgttgccgagcgtgaaaattgccatcaggaaaatcaacgcactgcggcgggcacgatgagaaagtagaagcgtcatcagcggcgcgccaaccattacgccaactgcataggcactgattaacattccggcagcgggaatcgagacatccacaccgcgcgcaatgacgggcaacaagcccattggcgagaactccgttgtcccgataccaaacgcgccaatcgccagcgccagcaacggatagttaattttcatgccttatctccacctcttcgcgtcattacgcgatattcattaaagtggcgaaagcatgacagcaatcacaaaaaaatgaaaataacaaaaagagaaaacacttttgccattttgctaacaaacaggaaggagatgcgagggagaacgcgctccctcgagaggaaatcagtgcagcgcggcagtcaaacccacggctacgatcaaaccgaggacgataatcgttgttaccagtgaaaatttaaggtcggtgctcatcaagttttctccttttttattaccacacaaaaagtgatattacgcatttttacacactgtgatgaaaaaatctcccgtcatttataatgataagtgtttttaccacttccccttttcgtcaagatcggccaaaattccacgcttacactatttgcgtactggccattgaccccttcctgacgctccgtgtcgtttttccggcgtaccgcaacacttttgttgtgcgtaaggtgtgtaaaggcaaacgtttaccttgcgattttgcaggagctgaagttagggtctggagtgaaatggaatggcaacaataaaagatgtagcgaaacgagcaaacgtttccactacaactgtgtcacacgtgatcaacaaaacacgtttcgtcgctgaagaaacgcgcaacgccgtgtgggcagcgattaaagaattacactactcccctagcgcggtggcgcgtagcctgaaggttaaccacaccaagtctatcggtttgctggcgaccagcagcgaagcggcctattttgccgagatcattgaagcagttgaaaaaaattgcttccagaaaggttacaccctgattctgggcaatgcgtggaacaatcttgagaaacagcgggcttatctgtcgatgatggcgcaaaaacgcgtcgatggtctgctggtgatgtgttctgagtacccagagccgttgctggcgatgctggaagagtatcgccatatcccaatggtggtcatggactggggtgaagcaaaagctgacttcaccgatgcggtcattgataacgcgttcgaaggcggctacatggccgggcgttatctgattgaacgcggtcaccgcgaaatcggcgtcatccccggcccgctggaacgtaacaccggcgcaggccgccttgccggttttatgaaggcgatggaagaagcgatgatcaaggtgccggaaagctggattgtgcagggtgactttgaacctgaatccggttatcgcgccatgcagcaaatcctgtcgcagccgcatcgccctactgccgtcttctgtggtggcgatatcatggcaatgggcgcactttgtgctgctgatgaaatgggcctgcgcgtcccgcaggatgtttcgctgatcggttatgataacgtgcgcaacgcgcgctattttacgccggcgctgaccacgatccatcagccaaaagattcgctgggtgaaacagcgttcaacatgctgttggatcgtatcgtcaacaaacgtgaagaaccgcagtctattgaagtgcatccgcgcttgattgaacgccgctccgtggctgacggcccgttccgcgactatcgtcgttaatcacccgttgcgggagtctcttccggctcccgcagccactccttattcagcgtctcactatcgccgagatactcaagcaaccaggttaacgcaggcgacatatcattttgctgccatgtcagacaacatgccgaatccggaaaggggttttccagttctaatgctacccacttcccctcattaagccacggtttggcgaaatgtgttggcaccatccctatgcataatcctgccgagatacaggttgccgatgattcccagtcaggcacgacaactcttttttggttatccagcaaccaggtaatacgtttaggtagcgttcgcgaggtgtcttcgcgcaccaacgacggccagttgcgcaacgtatcatcgctgaacgggccatccatcaacgccagcgggtggtgactggcaacaacgcaactccagcttagcatccccatatcccggaaggcataacgaccgcctaccggaatcgcgcgtgttgcgccaatcgccagttccacgcgcccgtcggaaagcgcatcccagacaccgttgaacacttcctgaaagacaagaagttcgacatcatcaaaatggcgataaaaatcaacgatcatctgccgtgtacgttctggcctgacaatattatccactgcgatagctaactgaccgcgccagccgttcgctatctgctgacattgctggcgggtgatctgcatttttttgacaacagagcgcccttctttgagaaaccacgctccagcagcggtcagctccacatcacggtgccgtcgttcaaagagcggcaccgccagccactcttccagctgacgcacggtatagctgaccgcagaaggaacgcgatgcagctcctgtgccgcagcgctaaaactaccattacgcgctaccgcatcaacaacttcgagtgaatattctgaccacatagtctgcctgcaaaatttttgaaaccagtcatcaaatattaccgtttcacaacactaatttcactccctacactttgcggcggtgtttaattgagagatttagagaatatacatgcaacctgggaaaagatttttagtctggctggcgggtttgagcgtactcggttttctggcaaccgatatgtatctgcctgctttcgccgccatacaggccgacctgcaaacgcctgcgtctgctgtcagtgccagccttagtctgttccttgccggttttgccgcagcccagcttctgtgggggccgctctccgaccgttatggtcgtaaaccggtattattaatcggcctgacaatttttgcgttaggtagtctggggatgctgtgggtagaaaacgccgctacgctgctggtattgcgttttgtacaggctgtgggtgtctgcgccgcggcggttatctggcaagcattagtgacagattattatccttcacagaaagttaaccgtatttttgcggccatcatgccgctggtgggtctatctccggcactggctcctctgttaggaagctggctgctggtccatttttcctggcaggcgattttcgccaccctgtttgccattaccgtggtgctgattctgcctattttctggctcaaacccacgacgaaggcccgtaacaatagtcaggatggtctgacctttaccgacctgctacgttctaaaacctatcgcggcaacgtgctgatatacgcagcctgttcagccagtttttttgcatggctgaccggttcaccgttcatccttagtgaaatgggctacagcccggcagttattggtttaagttatgtcccgcaaactatcgcgtttctgattggtggttatggctgtcgcgccgcgctgcagaaatggcaaggcaagcagttattaccgtggttgctggtgctgtttgctgtcagcgtcattgcgacctgggctgcgggcttcattagccatgtgtcgctggtcgaaatcctgatcccattctgtgtgatggcgattgccaatggcgcgatctaccctattgttgtcgcccaggcgctgcgtcccttcccacacgcaactggtcgcgccgcagcgttgcagaacactcttcaactgggtctgtgcttcctcgcaagtctggtagtttcctggctgatcagtatcagcacgccattgctcaccaccaccagcgtgatgttatcaacagtagtgctggtcgcgctgggttacatgatgcaacgttgtgaagaagttggctgccagaatcatggcaatgccgaagtcgctcatagcgaatcacactgatctatatcgatatacttatacttaggctgctaacaaaattttgttgtatgattgaaattagcggcctatactaatttcgagttgttaaagctacgataaatattatgtttttacggggacaggatcgttcccgactcactatggatagtcatttcggcaagggttcctcctttccctctgttctacgtcggattatagactcgcggttttttctgcgagatttctcacaaagcccaaaaagcgtctacgctgttttaaggttctgatcaccgaccagtgatggagaaactatgagttcatcgtgtatagaagaagtcagtgtaccggatgacaactggtaccgtatcgccaacgaattacttagccgtgccggtatagccattaacggttctgccccggcggatattcgtgtgaaaaaccccgatttttttaaacgcgttctgcaagaaggctctttggggttaggcgaaagttatatggatggctggtgggaatgtgaccgactggatatgttttttagcaaagtcttacgcgcaggtctcgagaaccaactcccccatcatttcaaagacacgctgcgtattgccggcgctcgtctcttcaatctgcagagtaaaaaacgtgcctggatagtcggcaaagagcattacgatttgggtaatgacttgttcagccgcatgcttgatcccttcatgcaatattcctgcgcttactggaaagatgccgataatctggaatctgcccagcaggcgaagctcaaaatgatttgtgaaaaattgcagttaaaaccagggatgcgcgtactggatattggctgcggctggggcggactggcacactacatggcatctaattatgacgtaagcgtggtgggcgtcaccatttctgccgaacagcaaaaaatggctcaggaacgctgtgaaggcctggatgtcaccattttgctgcaagattatcgtgacctgaacgaccagtttgatcgtattgtttctgtggggatgttcgagcacgtcggaccgaaaaattacgatacctattttgcggtggtggatcgtaatttgaaaccggaaggcatattcctgctccatactatcggttcgaaaaaaaccgatctgaatgttgatccctggattaataaatatatttttccgaacggttgcctgccctctgtacgccagattgctcagtccagcgaaccccactttgtgatggaagactggcataacttcggtgctgattacgatactacgttgatggcgtggtatgaacgattcctcgccgcatggccagaaattgcggataactatagtgaacgctttaaacgaatgtttacctattatctgaatgcctgtgcaggtgctttccgcgcccgtgatattcagctctggcaggtcgtgttctcacgcggtgttgaaaacggccttcgagtggctcgctaaaggctattctatcgccccctctccgggggcgatttcagatcaggcttctgtgcctggttgattcatggcattttctcgtgccgccagcacacgttctaccgtatctaccactgcctgagtttgtggatcgatttcaatgttgacgcgtgcgccaagttttttcttcccaagagtcgtgcgttccagtgtttccggaattaaatggacgcaaaaacgcgttggcgtgacttcgccgacggtcaggctaataccgtcgatgccaataaatcctttgtacagaatatatttcatcaactgactatcctggactttaaaccagatctggcgattattttctgaggttaatattttcgccacttcagcagtggtcataatatgacctgacattaagtgtccgccaatttcatcactgaatttcgccgcacgctcaacgtttacccaatcccccacttttaaatcgccaagattggtaatgcgtaacgtttctttcatcaggtcaaaactgacatggttgccgttaatttccgtcacggtcaggcagcaaccgttatgcgccacggaagcaccggtttccaggccgtccagcatgtggtcgggtaactccaccacatgcgtacgaaaatttggtttctcgtcaatcgacaccagttttgcggtgccctgtacaatccccgtaaacatacttacaactcctgaaatcagttaagacattctgttcagcacaatagcaggtggaaaacgcccttaccagtgaaggggtaagaatggctattttttcactggagaattaataaatcctcgctacaatagactgaatttcccctgcttcttctttttgctgcccattcaggcggctttttagtctctcatataactacaaataaaaggtgttcacgtgcagaagtatatcagtgaagcgcgtctgttattagcattagcaatcccggtgattctcgcgcaaatcgcccaaactgcgatgggttttgtcgataccgtgatggcgggcggctatagtgccaccgacatggcggcggtcgctatcggtacttctatctggcttccggcgatcctctttggtcacggactgctgctggcattaacgccggttatcgcgcaattaaatggttccggtcgacgtgagcgcattgcgcatcaggtgcgacaaggtttctggctggcaggttttgtttccgttctcattatgctggtgctgtggaatgcaggttacattatccgctccatggaaaacatcgatccggctctggcggacaaagccgtgggttatctgcgtgcgttgttgtggggcgcgccgggatatctgttcttccaggttgcccgtaaccagtgtgaaggtctggcaaaaaccaagccgggtatggtaatgggctttatcggcctgctggtgaacatcccggtgaactatatctttatttatggtcatttcggtatgcctgagctcggtggcgttggttgtggcgtggctactgcggcggtgtattgggtcatgttccttgccatggtttcttacattaaacgcgcccgctccatgcgcgatattcgtaacgaaaaaggcaccgcaaaacccgatcctgcggttatgaaacgactgattcaactcggtttgccgattgcgctggcactgttctttgaagtgacactgtttgccgtcgtggctctgttagtgtctccgctcggtattgttgatgtcgcaggacaccagattgccctgaactttagttcactaatgttcgtgcttccaatgtcgctggcggcagcggtaactatccgcgtaggttatcgtctgggtcagggctcaacgctggatgcgcaaaccgctgcgcggaccgggcttatggtgggtgtctgtatggcaaccctgacggccattttcacggtttcactgcgggagcaaatcgccctgttgtacaacgacaatcccgaggttgtaacgctggctgcgcatttgatgttgctggcggcggtatatcagatttctgactcaatccaggtgattggcagtgggattttgcgtggttataaagatacgcgttccattttctatattacctttacggcttactgggtgctgggcttgccaagcggctatattctggcactgaccgatctggtcgttgaacctatggggccagcaggcttctggataggctttattattggcctgacgtcggcagccattatgatgatgttgcgtatgcggttcctgcaacgtctgccgtcagccatcattctgcaacgagcatcccgctaataaagacaaggcgcaaccttcacgggttgcgcctgtatttttacgcaggctggagcgttgcgccaatcccgtcttcgtctggctgtaatttcagagcgttacacagagtttgccgactggcatctgttatctcaacgtgtatatccccggtaacttcccctttcacattgatgaagtcaggtgaaatttcttttgcactggtttgcaggcaaatcgctccctctccgcgcaggcgtttcactttcagttgcacatgcgttgccgcatcagtgatcagccacagttttccaccattcagattgatgttaccaacaatgaaagtgacactgtcaccttttaccgtactgccgtctagaatcaacacaccgccctgctgtacagtaatcgttgattgttgcagctctgcgccataaccaataatcattgaagcgccgtccagtaatgcaacactcccggtcagttcaaccggtgcgcgatcttcctctacgacaaaattttcgtccgcgctggtgggtgacaacaggatcactgtcccaccttgtattaccgcgttttccagcgtaccggcatgcacttcagcccgaccacccacattcacggacaggttttgcgtcttaccggaactgtagagctgaaggccatccgtccccagacgataaatggatccattctcaacaatagtgtcagagtcttcaccaccgagattattcatggtgccaccagcaagcaacgtatcactggctttcccggccagcataaaaacgccgccctgattaatctcacaattgctggcttccccacctggatacaccaacaattcaccaccttcatctaccacgaccgctgaggttgtcccattaaccaacaggccgccctcttgatcgagaatgattttttccgcgcgatgtccttccagtacacgcaggttaccgccattttccagcaacaaaccgcaggcataacctttatcaacgctgaattcaccttcgggatggcggccattaaccgtagcgagcgtagagagactaattgcgcctccctcggactgaacaatatctgtggcaatggcaccatcgctgaccgatagcgtgccattgttaccgtactgtgtgcatttggcgatcccaccggttgccactttcaaccagccagcccccgtgaccacggtattttcggctcttccgccagcttcaacaatcaactcgccttcagtaagttgcgtcgcgccaatgacctcgccggtcttaacaatttgcacgttcccgtcgctcatcaagtttttcgcatcagatcccatgatttattcctttgctgcatctgtgtgcctttattgctacctaagtgtaaaggctacggaggatttatccacgacagatttgagatggtggcaaacaactctgtttaaactctgatacacgaattattgggttgtatcagatgtaaatgcgatcctgaataaaaatcacccttgcaaatcaacaaaatatagccaatttgcttaaaagctctgcaaacggtcgaaatagcgcagaaaattacgttttgcctcttgccaccttcccactctgccgctaatattcgtccccgttgtcacctacaacgttgcgttcatagctcagttggttagagcaccaccttgacatggtgggggtcgttggttcgagtccaattgaacgcaccatcctgcgtccgtagctcagttggttagagcaccaccttgacatggtgggggtcggtggttcgagtccactcggacgcaccagattttcttaatctggtcttctcctttttccctctgtttcttctctgtatccaatacgttaaaagatttacactgtcttcgtatgcgttatcagaaggagaatcgctatggcaactttgttacaacttcattttgcttttaatggcccatttggcgacgcaatggctgagcagcttaaaccacttgctgagtcgattaatcaggaacctggttttctgtggaaggtatggacagaaagtgaaaagaaccacgaagccggtgggatctaccttttcactgatgaaaaaagcgcccttgcctatctggaaaaacatactgcccgactgaaaaatctcggcgttgaggaagttgtcgccaaagttttcgatgtcaatgagccacttagtcaaatcaatcaggcaaaactcgcctgacagaatttaatcaagggcggttagcgcccttttcatccctgtctgaaatttctcaaattctaaaaatctcaaccaaacttatctgataacactaaattcgaaagaatgcgtacaggtaagtaacaatgaaaaaaattgctattgtgggtgccgggcctacggggatctacaccttattctcgcttctacagcaacaaactccactttctatttctatcttcgagcaggctgacgaggccggtgtcgggatgccatacagtgatgaggaaaactcaaaaatgatgctggcaaatattgccagtattgaaataccgccgatttattgtacgtatctcgaatggctacaaaagcaagaagacagccatctccagcgttatggcgttaaaaaagaaaccttgcacgatcgtcagtttttaccgcgaattctgctgggcgaatatttccgcgatcaatttttacgactagtagaccaggcacgacagcaaaaatttgcagtggctgtttatgaatcatgccaggttaccgatctgcaaattacaaatgctggcgtcatgctcgctacaaatcaggatttacccagcgagacgtttgatttagcggtgatcgccacgggtcacgtctggcctgatgaagaagaagcaacccgaacgtattttcccagcccgtggtcaggcctgatggaagcaaaggtcgatgcgtgtaacgtgggtattatgggaacatccttgagcggactggatgcggcaatggcagtggctattcagcatggttcgttcattgaagatgataaacaacacgtcgtttttcaccgcgataacgcaagtgaaaagctaaatatcacgttgttgtcgcgcacgggtattttacccgaagccgatttctattgccctattccctacgagcccttacacatcgtcaccgatcaggcattaaatgctgagattcaaaaaggcgaagagggccttttggatcgggtatttagattgatagtagaggaaatcaagtttgctgatccagactggagtcaacgcatagccttagagagcctgaatgtcgattcctttgctcaagcctggtttgccgagcgcaaacaacgcgacccatttgactgggcagaaaaaaatctccaggaagtcgaacgcaataaacgagaaaaacatactgttccctggcgttatgtcattctgcgcctgcatgaagccgtacaggaaattgttccacatctgaatgaacacgaccataaacggttcagtaaaggccttgcccgggttttcatcgataattatgcggcaatcccttcagagtctattcgtcgcctacttgccttacgtgaagcgggaatcattcatattctcgccctcggtgaagactacaaaatggaaattaatgagtcgcgcaccgtcctgaaaacggaagacaacagctactcgtttgacgtttttattgatgcccgcggacaacgtccgcttaaagtgaaagatatccctttccctgggctacgcgagcaattacagaaaacaggggatgaaatccctgatgttggcgaagattatacgttacagcaacccgaagatattcgtgggcgcgtagcgttcggcgcgttgccctggttgatgcacgaccagcctttcgttcagggacttacggcatgtgcagaaattggtgaggcgatggctcgggcggtcgtaaagcctgcatcccgtgctcgtcggcgtctttcgtttgattaaaggtaaagctatcagcactcaacaaactgatgctgttcattaagacgatagcggactccggctcgaatattgttttcaccttcaatggcgacggcgaagcgaactctttcgccgtcatgatatgccagtgcggcgcttcctcctggcccgagaataattgagtcgaccacgcccgtgctcactaccgttgaattttcaccgctggcaatgatgtgtacattgtcgccgctgttggcaattctggcgtttgcgccaaagctggcgatttgcaccaggtcaccattactggcgacatgacaccgttcacccaatgtacaaacgcgtactcgcattccggtattcgcaatccgactgctatctccagcgctgcttatccgcgaagaattaccggttacagcaacccgtgcgcgttcaccggagctgccaatgtgactgttaaagccgacacttccaatccgcacgctataacccatactggcaatttgcgcggcatacccagcggttgcgattctggcgttatcctcacaacagccgatgcgagcatgatcgtcgctgcgggcaaactgactgcaaaatggtctctctccggggtctgtggccagtttttgcatagaggaaacttcctgatgcgcgaagttttcatccgccagccattttttccacgcatactcaaccagactctccgcccagtccgtatatccttcctcaatcagtgcatgatgaatatcggcataactaccgccgcgtgggaaatggcgcaggaaccagcgatacatcaccgctccgatacgccattctcgcaggtctgcttgtgtaatgatcattcgttagtgccggtgatagccatcgaccatgcttttaaaggtttcgtgtggcgtacgccccgtggtgcaaagataaagatgaccgaagataaaaaagaggcttataaatgccagagcaaaatgtgtctgcaataaccagtatcttacgccaggaaacacatctcccacggcttgcggatagagacacagcagccccgtcaatagtaacaacggcagcaatccatacatgacaccaacataggcgacctgctgtaagggattaaatttagactgggttgttgccgggaaaggatgttcttccccctgcataatgccaaacaaataaaatcgcgtttgttttgccgctcgttccagccacccctgacgacgaatgcgatagtggtgaccattatccccaacggcattgatcagcacaaagccgagccagcatgccagtaacaaaaatccgcaaacttcatgcaccgcaaccagacttttaaccgcagttgcgcccaccatcgcaaagtgatttatcagcccactggccagcaacaatacaaagagtaacgcattcgaccagtgccataatctgaccgctttgctgtaaagataaatcttctcaccatgatcggtggctgatttcttcacgccacgagcacgaagcaaggcatgcagccccagcaccaaccacatcccaaccagcaatactccggcaatgatcaaccacaccggccaaaattcgggagtgaactgtggcacatagttcgctaactggctctgaaactgttcagcatgttgcgacgggttcatacattttcctttttaatcaaatgttgaccgaaccggcgatacagatgcggtttcccggcaccaggtagctgatattgatagtatttattttgctgcaaccacgcctgaatttctgggctatcttcgcgaccaaagatcaatgcgtgttccgggcaggcgctgacgcaaatgggcggaaagccttttgccagtcgggactcagcgcagaaatcacatttatctgccactttagtgacagggttaaggtagcgaacctggtacggacaagcgccaatgcaataactgcagccgatgcactgcgatttttctacccgcacgatcccctgctcatcacgccacgacgcccccgtcgggcaaacgtcgatgcacggagcatcttcgcagtgctgacatgactggcgaaaaaagtgatactgcgtttcgttgtcgttatcggtgactggaatgtgtgctatcgataaacggcttccctgagcggggacgtggttagttttacggcatgcgcgggcgcaaatattacagccattgcaccgtgactcgtcatgaatcatggcataccgaacttccttttcttgcctcgtgttcgctaacagagaagacgcagaaccagtaaaaaagattactgttcccatccccagaacaaatttgcgtcgagtgaaggacatctgattatcccctaatgcagtggctgcaactgtccaccctatccatgacatctccctgaaatttcaggggttctgaaactgctctacctcgaaccattcgcataagccataagccttgccataggtcataaatcgctcgctaaacaagtacaacaccgccgtcgatgactccacctgccgtatatcggcatattcaggtgcaacatccatcgcggcgatcgcggcttcaatctgcgcttcctggaagtaatatggcgcttgcatcagcatggcgactttgtaaggacgaggatacgtctggcactcaaaacgaacggcgtgtgcaatggcgcgacaaatgtcctgctccacaacttgcaaagacatcgccgcgtagttttcactcatggcctgcgttgagtaatagtaatcatccttgcttcccgtcaaacaagcgatatccgcgtagtctccgttctgcttaatgctttccagcaaaactgacagttcctcttctgcaaccaaatagggtggcgagagaaacacggcgcgcgccaccagctgcccagccgcagaatgctggcgaatgaactcagccaggatttcagcaggttctggttcggttaccgtatcaacggggtgacgcatcccctgcaaccattgccgcttcgcctcgtcaacttcgctgactttcgctaacggcaattcatcctgatggttcatcttacccattccttacgcaggcagtagattgtgtgctgccagatcggcggcaatatcttccagccccagacgctgcaatgtttcgcgggttggacaaccaagctgtgggtcccagcccatttctttgtagaacatcgtgagcgaagcatgcatatcgtcacgatccattttgtcagtaccttcagtaaagaccgggatctgcggatccttgtcgaatacccaggaacagataagatcgtgttcattacgcatatctttggtttgcatcagttttaccgtgtaggcacgatgcaacgtaaaaatacgctctgcagctaaatctaatttttcctgagtcatctcttcgccggtgatcgctttgaagaatttggcttcaagcgccagatcgccccggtaattacggcttttcagcggcgaaacggtcattggccagacccagttgcacagggtgacggcgttatgcaaacagacccgcaacagcgaccactttgcatatttaatttttgcgtcattgattggcgtgtagtttttggtttcatcgtaagcatcttcagaaccaaaaagttctttcgccacttcacgttgcagtttcaatggcaagccggaaccaataaagttgatatgggtatgcgtcatgcagtcacggttgaacatacagttaacaatggaaccgacctgcgctgacgcttcattggcatggtgaaccggatagccaaacggcgaccagagtttatttttcgcgtagccccagtactcttcacccaaattccagcgttctgcgatggcatatgaaccatcagccaggtgactcagctcacccacacgatgcgccagacggtagtaaaaatctttaatgaagttaacgtcacccgcttccagttgatcccagcgaatttctgcatactcttcagctggcagaacacgcttgaacacacctttgctgtaacaataagtaaagtcgcgatgcaactgcccgtagttacaccataggccgtagtcatcgaacaaattcagacccaccaggttaccaatcacacgaccatcgtctttatcttcaaaatctttcggcccgttcgggaagatggtggtatggacaaagtttgctacacaagtgttaccacctgtgctgggcacgccaaactctttcacccgaggaatattcatttgggtcatacaacggatcgggcaagagtggcagccgctcatttttactgtgtatttctctgccgccggtcctaagtcaaaaacggatttataggtacgaaagccgaccgtattctgattgcctggcggaatttcacccgtttcaatcggaccaccttcagccgcgccccaaaacagccctttacgtgctgtccagcgtgacttgggatctgaatactctgcccacgattgtggcgtacttggcacgacatggttgttattcgcaccaataagttcagtcatcatgtaatcattgagacgcttcatctcctgacgatcggcaatgttgacccctttcgtcccttcaaccgcaatcgctttcaggtttttcgaacccattattgcgccagttcccgcaccgccgctgtggttacggctattcaacatgccagagagaggaacaaggttttccccagcctgaccaatagccgccacacaggtttccggactggtcaatcgacaaatttcttccgtcgttgcgcgcgtcccttttccccataagaaatcggctttttccaggctaactttgtcatctttaatcttcagccataccggtgatttcgccttcccttcgataataatgacgtcgtatccagcgaatttcatttgcgctgcaaaaaagccacccatatgggcatcgacgactaaatttcctttggtaaaagtagaaagtgaggtgatatttacgcgagaactacagggggcaccagatccagttaatgggccggtagcaaagactaatttattcgcttcatcgaaaggtttcgtgcctggcggtacttcgtcatacataattttgtagccgaagcccatgccaccgacaaaacttttaaacttactggaatcttcgagggtaatatttcctgtcgtgagattgactcttaatatattacctgtccaaccgttagccatgattttttcctttgcaagattcacacagtaatatctttccactcgataatttttaacgcccctgttgggcaggcgtttgcgcattcaccgcataacacacatttcgaggattttttactttcggtatttacggtggccatcatccacgggcatgccgtagtacaggcgctacagccaatacagcgtttatgatcgacggtaatacagccttctttctgctgccaggtaatcgcaccaatcgggcagacgttcatgcattgcggctctttgcattgacggcaggtgtccgcggtatagttgagatcgccatacaggccgccgccagagccaaccccgttgtcgccaaagaaataattgcgatggattttgatacgggagaagaatgtccctactgagccatcgttgaagttggtacaagagatttcacagcggtggcaacccgtgcatcgcgctcgctgggtcaccagcacccctttgggggtatttatcaaccctactgtgccgctatcaatatcttcctgtttgcaacccaaaagtgacagtaacgcaggggcaattgttagaccagcaaggccttttcctgatatacgcaagaattctaatcgcgttaagccaatatctaatagtggacgatcaaccgggttcatttatttcgcatcctcttcgcaaacacagtgctgacaattcagcagcctgatattaagcattcaactaatacgctgctgactctgtccccaacaccagatattttccctaacccgatagtgtatgagaaaagattaacgccgataaactaatcctttatggttaggagaaaaaataatgtgattattctgagcccttaacattgatcgttatcaattaaaattacaaagcaagaaattataagtgaactgatatttattatcatttgaaataaatttaacttaagcgacaattatttgtgactttcattgcagaaaataaaaataacattatcgctataaattaaaatacataccgaaattcgtataatttcagcagttgttatttagaatgattaactggaccgcaactgaagcaagaatatcaggatgaagcttaccgcctcatcctgaatggtcattttaccagtgcgttaatgacggtttccatcgcctgcttttccagctcactgcgctgaatgcgtttattggctaatgctgtacgtaatacgcctgcgataacaatatgctttggttcctgccccagatcgcgcatttccagcacaactttaccgacaactctgcacatttctcggtacagttcatcctcttttgtccgatttcccattctttatacctatttatcatgccaactatcagcatatatcaatctaaccaattaaacaaaaatcaaacaaaatcagacaaataacgcgataaattattttaactgtagcaattgagcgatgatatatttatacaccggatgaactttcacttatcctcacactgacaacttcggcaccagacgttgcgcaaacagtgaagtttttgcgtaaccttttccctggaacgttaaatctttgataacaatttattgtctaacaagttgtatattttttgaaacgctgtttttgttttccttttggattaatttcagcgtataatgcgcgccaattgactcttgaatggtttcagcactttggactgtagaactcaacgactcaaaaacaggcactcacgttgggctgagacacaagcacacattcctctgcacgctttttcgatgtcacctatccttagagcgaggcaccaccactttcgtaataccggattcgctttccggcagtgcgcccagaaagcaagtttctcccatccttctcaacttaaagactaagactgtcatgaaaaagaccaaaattgtttgcaccatcggaccgaaaaccgaatctgaagagatgttagctaaaatgctggacgctggcatgaacgttatgcgtctgaacttctctcatggtgactatgcagaacacggtcagcgcattcagaatctgcgcaacgtgatgagcaaaactggtaaaaccgccgctatcctgcttgataccaaaggtccggaaatccgcaccatgaaactggaaggcggtaacgacgtttctctgaaagctggtcagacctttactttcaccactgataaatctgttatcggcaacagcgaaatggttgcggtaacgtatgaaggtttcactactgacctgtctgttggcaacaccgtactggttgacgatggtctgatcggtatggaagttaccgccattgaaggtaacaaagttatctgtaaagtgctgaacaacggtgacctgggcgaaaacaaaggtgtgaacctgcctggcgtttccattgctctgccagcactggctgaaaaagacaaacaggacctgatctttggttgcgaacaaggcgtagactttgttgctgcttcctttattcgtaagcgttctgacgttatcgaaatccgtgagcacctgaaagcgcacggcggcgaaaacatccacatcatctccaaaatcgaaaaccaggaaggcctcaacaacttcgacgaaatcctcgaagcctctgacggcatcatggttgcgcgtggcgacctgggtgtagaaatcccggtagaagaagttatcttcgcccagaagatgatgatcgaaaaatgtatccgtgcacgtaaagtcgttatcactgcgacccagatgctggattccatgatcaaaaacccacgcccgactcgcgcagaagccggtgacgttgcaaacgccatcctcgacggtactgacgcagtgatgctgtctggtgaatccgcaaaaggtaaatacccgctggaagcggtttctatcatggcgaccatctgcgaacgtaccgaccgcgtgatgaacagccgtctcgagttcaacaatgacaaccgtaaactgcgcattaccgaagcggtatgccgtggtgccgttgaaactgctgaaaaactggatgctccgctgatcgtggttgctactcagggcggtaaatctgctcgcgcagtacgtaaatacttcccggatgccaccatcctggcactgaccaccaacgaaaaaacggctcatcagttggtactgagcaaaggcgttgtgccgcagcttgttaaagagatcacttctactgatgatttctaccgtctgggtaaagaactggctctgcagagcggtctggcacacaaaggtgacgttgtagttatggtttctggtgcactggtaccgagcggcactactaacaccgcatctgttcacgtcctgtaatattgcttttgtgaattaatttgtatatcgaagcgccctgatgggcgctttttttatttaatcgataaccagaagcaataaaaaatcaaatcggatttcactatataatctcactttatctaagatgaatccgatggaagcatcctgttttctctcaatttttttatctaaaacccagcgttcgatgcttctttgagcgaacgatcaaaaataagtgccttcccatcaaaaaaatattctcaacataaaaaactttgtgtaatacttgtaacgctacatggagattaactcaatctagagggtattaataatgaaagctactaaactggtactgggcgcggtaatcctgggttctactctgctggcaggttgctccagcaacgctaaaatcgatcagctgtcttctgacgttcagactctgaacgctaaagttgaccagctgagcaacgacgtgaacgcaatgcgttccgacgttcaggctgctaaagatgacgcagctcgtgctaaccagcgtctggacaacatggctactaaataccgcaagtaatagtacctgtgaagtgaaaaatggcgcacattgtgcgccattttttttgtctgccgtttaccgctactgcgtcacgcgtaacatattcccttgctctggttcaccattctgcgctgactctactgaaggcgcattgctggctgcgggagttgctccactgctcaccgaaaccggataccctgcccgacgatacaacgctttatcgactaacttctgatctacagccttattgtctttaaattgcgtaaagcctgctggcagtgtgtatggcattgtctgaacgttctgctgttcttctgccgatagtggtcgatgtacttcaacataacgcatcccgttaggctccacggaatatttcaccggttcgttgatcactttcaccggcgttcccgtccgcacgctggagaacaaggctttaatatccggtgcattcatgcgaatacaccctgaactgacgcgcaaaccgacgctgtccggcgcactggtaccatgaatgaggtattcgccattaccatgcgcgaggcgcagtgcgtaacgtcctagcgggttatttggtccggcaggaacgactggcggtaatttaatgccacgctccagcgaacgctgacgaatgcctgccgtaggcgtccaggttgggttagggattttctgcccaacacgcgtttccatcaccggcgtttccagcccctgcaatccaatacctattggataaacctgcacaatattttctcccggcggataataataaaggcgcagctctgcaaggttaacgataatcccctgacgcggtgcatcaggtaataacagttgtgaaggaatagttatcgtcgtaccaggttttggcaccggggcgatagtgttattggcttcaaggatcaacattgccgcagtatcaaaacgtcgggcaatagcctgaaggtttttatccccttcttgcaccgtatacgtttgattttgcccaaccagtcggcttccggttggtggtagcggataatcaaccgcccaggcagcctggatggcgctaaaagcgccgataagcgtgagtgtaagcaaagacgcgcgtttcattgtaaacctcctgtatttgccggagactcacgctgaaacgtcggatggcgcttatgttcacctgaaaccaaaacactcctgtgcaggtcagtgtaaacattgaccatccggcaatgtgagccaaccggatgaaagctgtccttttagtttagctaagtgcagcggctttggcgcgaattgcgcgaatcatcgcttccagaccttgtgaacgagatggggtgagatgttgggtgagcgccattttttcaaaccacggacgcacatcgaaattgacaatatcctgcggcgtcatctgatcgtagagaataaagacgaccgcaataagccctttcacaatcgccgcatcgctgtcgccctgtaattcaataattccctgggcattctggcgcatgacaatccacacctgactctgacagccctgaatgctattttgtggacttctgtcttcgtcgcgtaattctggcagacgctggcccagctcaataatgtagagatatttctcttcccagttggcgcagcgtaaaaaattacgcagcaacttttctttatccggcaataaagccatagtgcctccctgttatcccagcaaacggtgaatacgttgcaggccggtcaccagacgatccacttcttcatgggtgttatacatggccagcgacgcccgacacatcgcagggacgttgtaataggccatcaatggcattgcgcagtgatgtccggtacgcacagcaatgccgtaattatcgagaaaactgccaacatcataggcgtggtgtttaccgagattaaaagcaataacgccaagcctgttttgtgggccatagagagtgagatccggtacagattccagctgtgatagcgcataatgcatcagattctgttcatactcggctatgttattaagccccagcgccgaaacatactccagcgccgcgccaagaccaatgatgcccccggtattgggtgtaccggcttcaaaccgccatggtgctttggtccaggtagtgccttcactcaggctgacggtggcgatcatagaaccgcccccttcccacggcggcatctcctgcaacaaggcttctttcacataaagaatgccaattccggtggggccatacagtttatgcccggagaacacgtaaaagtcgcaatccagcgcctgaacatccaccggatgatgcatcaccgcctgagcgccatccaccagcacttttgcgccatgctggtgcgcaagcgtgatcatttccgccagtggattttctgtgccaagcacgttggagacatgagtaattgccagcaggcgagttttctcatcaaacagcgtaggcagcgtctccagttgcaacgtaccatcgggattgagcgggatcacacgcagctctgcgccaacgcgtgcgcaaagcatctgccagggaacaatgttagcgtggtgctccatctgactgatgatgatgttatcgcccgcccgcacgttgctgttgccccagctattggcgaccagattgatcccttccgtcgtgccgcggacgaacaccagctcttccgccgaacgggcattaataaacagcgatgcccgcttgcgcacgttctccattttctcggtcgcctgggcgcttaaggtatgaataccacgatgcaccgccgcgtagccatgacgataaaactcggcctcggcgtcaatcacctggctcggtttctgcgcactggcggcgctgtcgagataagccagcggcaaaccgtttacctcacgcgaaagcaccggaaagtcggcccgcactttgtcgacggaaaaaatcatcttgcacctcctggcagccgttgaccgattcgggccagcacctgctgtttaagcccctcatcacgcagtgcttccgtcagttcggcagcgaaggcgtaaatgatcatctgctgggcatcctgctgattgatcccgcgcgagcgcagatagaatatctgttcatcatcaatacgccccaccgtcgcgccgtggctgcatttcacatcatctgcatagatttccagctgcggtttcgtatccacttccgccagtttgcccatcagcagattgttgttggtcatctgaccatccgttttgatggcgtgctgcgcgacgttgatcaaaccgttaaataccgcgcggcctttgtcgctgacgatagttttgtgcaactgtcggctgttacaaaaacctttattgtgttccagccaggtacgggtatcacacacctcgtttttcaccggcatcgccaggctattgatccgcagcgtgctgttttcgccattgagttgcgtactggtgttgtgtcgtaacactgcgccacccagcaggaaactgtggctaaatgcggtggcatcctcagccagcaacaaatcgttatgagcaaagtggtgactgagcgggttttcaaacgccagcttgatatgctgcaagtgggcattcgctgcgacgttgatagtgaaccgtgccccggtaaaatgacgagcatcattcaggctgacaaaatgttcgatcaccgttgcttcggcaccttccgccagatccagatgatgtcggtaatgggcagtgttcacctcttcacctgccacgccctgggtgatatgcattaacagcaatggctttgccggccgttgaccgcgcttcacggcgatatgcgtcacgctttgtgccaggctttccgtcaaatgcagaaacacttccgcctgaatagcgtcgggtaaaccctgacggtcgtcgttaatgctcacttcatatccgctgccttcagttgcatcgctcagtgcgggcacgtaacgcccatcgacaaacaccagccgcacggagtctaacgttaacgctaaggcatcacgctgctgtggggatatctctcccgcaatgctgacaaactggctattgatcagcccttccagcggcgtatatttccagttttcatgtttacgtgtcggcagtccggtacgcagcaattgttgtaaatgctgctgtgcttgcggggagcgttttgtcccttcagcttcaaacaagtgatgccactgttgcagcgcgttactgctgttcggtaagccagccataaccctgctcctccagttgtttgaccaacgtgaaatcgccggatttcacaattcgtccctgatatagcacatgaacgtaatcaggcttgatgtagtcgagaatgcgttggtagtgcgtaacaatgatgaatgagcgcttgccatcacgcagcgagttcacgccatcggcgaccacttttaatgcgtcaatatccagcccggagtccgactcatcaagaatgcataactccggttccagcaccgccatttgcaaaatatcgttgcgctttttctcgccgccggaaaaaccaacgtttaccgaacgggttaataaatcttccggcatcttcaggagagcgattttctcttccatcaaatcctgaaaatcaaagcggtcgagcgtttcctggccgcgatagctgcgcaccgcattaagtgccgtttgcaggaaaaactggttactgacacctggaatctccaccggatactggaaggccataaagatgccttcgcccgcgcgatcttccggcgacagcgcaagcaaatctttgcctttgaactcaaccgtgccgcccgtcacttcataatcttctcgcccggcaagcgttgccgataaggtacttttgcccgaaccgtttggccccataatggcgtgaacttcgccgggatgaacgtcgaggcttaatccgcgcaggatagctttatcttccacgctgacgtgtaaatctttaatacttaacatgtttattccttatccgacgctgtgttcaagactgatggcgaggagtttttgtgcttcaacggcaaattccaacggcagctccgagaacacgtctttgcagaaaccgttaacaatcatcgagatggcgtcttcttcgctgatcccgcgttgcaggcagtaaaacagttgatcttcaccaatacgtgatgtcgttgcctcgtgttccagttgcgcactattgttacgacactcaacatacgggaaggtatgcgccccacaattagcgccaatcagcattgagtcgcactgagtgaaattgcgcgcattggttgccgtcggcatgattttcactaagccgcgataactgttctgactatgtccggcagagatccctttcgagataatggtcgatttggtgtttttaccgatgtggatcatcttggtgccggtatccgcttgctgatgaccgctggtcagcgccactgagtaaaactcaccaatggagttatcgccgcgcaaaatgcagctgggatatttccacgtaatcgctgacccggtttctgattgcgtccatgacattttgctgttttcgccttcgcacaaagcacgcttggtgacgaagttgagaataccgccggtgttgttatcgccaggaaaccagttttgtaccgtggaatatttcacctcggcgtttttatggatgatgacttccaccactgccgcgtgtaactgatagctgtcacgcaccggagcggaacagccttcaatgtagctgacgtagctgtcttcgtcggccaccagaatggtgcgctcaaactgcccggttttttctgcgttaatgcgaaaataggtggaaagttccatcgggcagcgcacgcctttaggcacataaataaacgtaccatcagaggctaccgccgcattaagcgcggcaaagaagttgtcattccccggcaccacggtgccgagatatttacgcaccagttccgggtgatcgtggatcgcctcaccaaaggaacagaaaataattccctgctccgccagtttttcgcgataagtagtggcaaccgaaactgagtcgaaaatggcatccaccgccacctctttgccttcccgcacgggaacgcccaactgctcaaacgccgcctccacctctttacttaaaaaggcgttcgcgccagtttgctgcaccgcgccaggttcagacgcgcaagtgtcgtcacaattaccgcacgatggtgctgagtagtagctgtaatcctgataattcagcttgtcgtagtgcgctttcaaccagtgcggttcttccatctccagccatgcgcgataggcgtttagacgaaactccagcatccactccggctcattacgcttcgccgaaattgcgcgcaccacctcttcgtttatcccctttgccagctcatcggtggctaactgggtgaagaatccttctttataattcagcgggccgccggtccaggttttgacatcgtcagttgcttcagtattacgagacatagtaccgcctataccccaaagctttcgccacagccacattcattctgggctttagggttgtgaaatttgaatatctgattaagtccttcacgaacgaaatcgacttccgtgccatcaataaacggcatcgcttgcagcgggacaaacagcttcgcgccgtcgtgttcaaacagcagatcgtctttgtccggctcgctaacactgtcgagcacatagccaaagcccgcgcagcccgtttgcttcacgcctaagcgcacgccgaccatacccggctgctttgccaccagctcacggatgtgtatcgccgctgcgggtgtcagcgttaagccttgccaggcgaaatcttgtgggttaaaggttcctgaatgcatgtccatcgatttacctcacttcatcgctttcagcgtataacagcatgttagtgataatgattatcagttcaacccagcaaacgcaggggctttaccgtaaaacatgctttttgcctgcttttaataagcatagaccctgatgtgtgggttaacaggcacgctaagaattaggtatctcattgttagataatggttattatctaaggagcattaaggctgtgatgaaaaagaaaaagttgtattgaaaatgactatttaagagataggtaaaaaagtgcagcgttcagaaataagaaaacccttaagtctgtgcgacacaggcttaagggtttctaccccatccggcgcttatctccggcactctcagtggcttagctcttgaaggggcgataagaataatctcataaagctaacccgccgttttaacacaaactgcgattagtattatttttgaacaatatcaggcggtagataagcagtattaagaaggtcatcgaacctggacggaggttaatccaggtcgatttggcgaacttgcggcattaagtcaggatcaatgcacgcccagacgccaggcaaagtagatttcttcttttaattcagcagaagagagagtaagcaggtcagcaaattcaagttctagttgtttcagacgtttgagatattgggcaggtgaaagattgctctggtcacggcgtaaaaattcaatggccagctgggtgggatcaagttgagtagacatagcatcctcgcttttagacaagacctgcacagtataccaccgtttactgtgcagataatgaccaaaagcaatatgcgtcacacttttctggtgacaacgtcacaaaatggcggtcgtcaatcgtgacgaacagcacaaacgccctttctcatcgaagatttcaatctgccagacctggtgacgcgaaccgagatgcaacggtttgcatacgccgcgcacccgcccttctcgtgccgagcggacgtggttagcattgatttccagaccaaccactttttgctcaccttcggtacataaataaccggcaacggaaccgatactttcggccagtaccacggatgctcctccatgcagcaacccgaaaggctgctttgtccgcgagtctactggcattgtcgcttcaagggtgtcatcaccaatatgttcaaagcgaatatccaggaaccccaccatgtttccttcacccatagcattcagtgcttccagggtgattttccgtttccatatcatttaataatctccagtaaagcctgcacaggatggcgtacccccgtgccttcaacccgttttacctggctacggcaggaatatccggtcgccagacagcggttacgcggcagtcgctgcatagcctgatgccaggataactcatagatcccgagcgaattttcatggtttttcgcttcatgtccgtaagtccctgccatgccgcagcaacccacgctgacattttccagtttcgcgccaaaacgggcaaatatcgcggcccattgtgctggcgcacccggcaaggcggtaacttcggtacagtgaccaaagaaataccatgattcaccgctgactgtagccactggctgtgactcaagtgcgcttgccagccattcattcgccagtaagacgttaaactcgccacgctcctcgcccagcgccagtttatattcatcgcgataacaaagtaccagcgccggatcgacgcccaccattggcatacccagcttcgccatacggttgaggaaatccgccgtctttttcgccgtcttcgcaaaacgattaagaaaacctttaatatgctgggctttgccatttggcgaaaatggcagtaacacaggctggaaacctaatttttcgaccagacggacaaaatccgccaccacttgcgcatcgtaatagctggtaaaggggtcctgcaccaccaacactgtgcgcgctttctgctctgcattgagagattcaagctgttccagcgtcatgtttgccgagcgatgccccaccatttgttgttgtagcgaggggaccgacagcagcggcaaatcaaccatgccgatatgtttttccgagagtttgcgcaccagcggctggttaatgaagaagttaaaggttttcggcgcgcgtgccatcagcggcgcgtagctctcgaccgtagcgacgaggtggtcgcgcagcgggcgtaaataacgggtgtgatagagctgcagaaaacgagagcgaaactccggcacatcaattttgatggggcactgggtcgaacacgctttacaggccagacagcccgacatcgcctctttgacttcgtgtgagaagtcatattcgcctttattcgcatgccagctattgcgcgtgcgggcaattaacgtccgcaaactgacgccggattcaggcagttcttgttccagtttgagtggatcaacgccgcgatccgccaacaaacgcagccattcacgcaccagcgttgcgcgccctttcggtgaatgaatccggttctgggtgatcttcatcgacggacacatcggactacgggcatcaaagttgaagcataaaccgttgccgttacactccatcgcaccgcgccactgctggcgtaccgcaatggggatctgccgatcgaatgtaccgcgcttcaccgcgtccactttcatcatcggcgcatcgagaccttctggcgggcaaatcttccctgggttgagtcggttatgcgggtcaaatgccgctttcactttgcgcagttctgcaaaaagttcctcaccgaaaaacgccgggctgtattcagcgcgaaaacctttgccgtgctcgccccacaacaaaccaccgtatttcgcagtcagcgccaccacgtcatcagagatttgcttcatcaaaatctcttgttgaggatcgcacatatccagcgctggacggacgtgcaagacacctgcgtcgacgtgaccgaacataccgtagcttaagccgtggctgtcgagcagcgcgcgaaattcagcaatataatccgccaggtgttccggcggtacgcaggtatcctcagcaaacggaattggcttagcggcacctttggcattgccaagcagaccaacggcttttttgcgcattgcatagatacgttcaacccccgccagctcacggcacacctgccagccgatgacacctgcttgatgactggcgatcagctcatccaaccgcgcacagagtgcatttacccgctcatcaatcagcgcctcatcatcaccagcaaattccacaatgttcagcccgagcatctcttggtcaggcacatcggtaatcaactcgctgacggaatgccagacaatatcttcccgcgccagattcagcacttttgagtccaccgtctctaccgaaagcgcccgcgcctcaaccataaacggcgcgttacgcagcgcagagtcaaaagagtcatatttgacgttcaccagacggcgcactttaggcaagcgtgtaatatccagccgcgcttcggtaataaaggccagcgtcccttctgaacccgtcagaatgcgcgtcaggtcgaactcggtcatctcatcgttaaagacatgacgcagatcgtaaccggtaagaaagcggttaagtttggggaagttgtcgataattaactggcgttgctgacggcaacgttgataaaccgtgttataaattcgcccgattgtggtattggatttacccagcgtttccgccaattcgacgggtaaaggttgcgtatcgagaatatcgccccccaacaacaccgcgcgtacgccaagtacgtgatctgacgttttgccatagaccagcgatccctgaccggatgcatcggtattgatcatcccaccgagcgttgcccggttgctggtcgaaagttccggcgcaaaaaagtagccgaacggtttcaggtactgattgagttgatcttttatcaccccggcctcaacgcgcacccagccctcttcagggttaatttcgatgatgcggttcatatggcgggacatatcaacaataatcccctggttgagcgcctgaccgttagtgccggtgccgccgccgcggggggtaaagatcagcgatgaatagcgttcctgcgcggcaagacgggcgatcagcgccacatctgcggttgaacgcggaaataccaccgcatcggggagaagttggtaaatactgttgtcggtcgacattgtcagacgatcggcataacttgtcgccgtatcgccggtaaaaccttgttgctccagctcttgcaaaaaattaagcaccagttgaacgacgccgggtgcctgggaaatctgtggaatcattatattgaccctttcctgcggtctgtgatgtaggtcgatacactattctttcaggctgctgcaatagcgcactgaaaggtgatgtttgtttactctatggatttcgtgttgcaggaaggcggcaagcgagtgaactccaggagcttacaatagtaagtgactggggtgaacgaacgtagccgcagcacatgcaacttgaaatacgacgagtaaatcgtttgcgtgttgcctgagttgttgtaccacatttttttctaacacgcccatcagaattaagggcagaatcggcctgttaaaaaccgctgaaattgctcatcattatgcaggtgagtttcgcgtgttcacgtcgcgtcgacgatttgacgcacaaaaaaggtgaaaagtagttatggtaaatgttcgtcagcccagggatgtcgcacaaattctgctttcggtgctgtttttagccatcatgattgtggcatgtctgtggattgttcaaccctttattctcggctttgcatgggccggtacggtggttatcgccacctggccggtattgttacgtttgcaaaagatcatgtttggccgccgctctctcgccgttctggtgatgacgctgttattagtgatggtgtttatcatccctattgctttgctggttaacagtatcgtcgacggcagcggcccgctaattaaagccatttccagcggtgacatgacgttacccgatctggcgtggcttaataccattccggtgattggcgcgaagctgtatgcaggctggcacaacttgctggatatgggggggacggcgatcatggcgaaagtccgcccttatattggcaccaccaccacctggttcgttgggcaggcggcgcatatcgggcgctttatggtgcattgtgcgctgatgcttctcttcagtgccctgctgtactggcgcggtgaacaggtggcacaaggcattcgccattttgcaacccgtctggcaggcgttcgcggagatgccgccgtgctgctggcggcacaggctatccgcgcggtggcgctgggtgtggtggtgacggcgttagtacaggcagtgcttggcggtatcggcctcgccgtatccggcgtaccttatgcaacgttgctaacggtgttaatgatcctctcctgccttgtccagcttggcccgttgccggtactgattccggcgattatctggctctactggactggcgataccacctggggaacggtattgttagtgtggagcggtgtggttggcacgctggataacgtcatccgcccaatgttaattcgcatgggtgccgatttaccgctgatcctgattctctctggcgttattggtggtttgattgctttcgggatgatcggtctgtttattggtccggttctgttagccgtttcctggcgtctgtttgccgcgtgggtggaagaagtcccgccgccgacggaccaaccggaagaaattctcgaagaacttggcgaaatcgagaaaccgaataagtaatttctcatcaggcggctctgccgcctgattgttaaccaccgctaattgatatttgcttgctcttccccatattttcctgcttaccgccattcagctggtagtacctgtcgcaaattctttacagtttttaaactaatgagacgaatctgatcgacgcaaaaagtccgtatgcctactattagctcacggttataaatcaacatattgatttataagcatggaaatcccctgagtgaaacaacgaattgctgtgtgtagtctttgcccatctcccacgatgggcttttttttaacatttttccgcttcgctacctcgcccctcactctttccaataatgttgcacaagatactgtgactctcttcaagccgtcagcaggctgataatgttatttatattttattgtttatttcatgcagccattacacgatgaacgcttatgaactccaggcactccgccatatttttgccatgactattgatgaatgcgcgacctggattgcccagaccggtgacagtgaaagctggcgtcagtgggaaaatggcaagtgtgccattcctgatcgtgtagtcgagcaactgttggctatgcgtcagcaaagaaaaaaacatcttcatgccatcatagagaaaataaataaccgcatcggcaacaacaccatgcgttttttccccgacttaaccgcatttcaacgagtctaccctgatggcaattttattgactggaagatctatcaatcggtagctgctgaattatatgcacacgatctggagcggctttgttaatttttccacagaaaggaattgtcgttgttacaacaataatgaacggatgctgacacaacatcgcttcactttttaaagcacctttgctaagtagaacctatgaaaaatccctatttccctaccgcacttgggttgtattttaattacctggtgcatggtatgggcgtccttttgatgagcctgaatatggcctcgctggagacactttggcagactaatgccgcgggtgtctcgatagttatctcatcgctgggcattggtcgattaagtgtcttgctttttgcaggattattatccgatcgctttggtcgccgcccttttatcatgctcgggatgtgctgctatatggccttcttttttggcatcctgcagaccaataacatcattatcgcttatgtttttggctttctggcgggaatggcaaacagttttctcgatgcaggcacttatcccagtttgatggaagcttttccacgctcacctgggacagccaatattttaattaaagcatttgtttccagcggacaatttttattaccgctaatcattagcctgttagtgtgggctgaactgtggttcggttggtcctttatgattgctgcaggcattatgtttattaacgctctgtttttataccgttgtacgttcccaccccatccgggtcgtcgcttacctgtcataaagaaaaccaccagctctacggaacatcgctgttcaattatcgatttagccagttataccttatatggctatatctcaatggcaacgttttatctggttagccagtggctggcacagtacggacaatttgttgcaggcatgtcatacactatgtcgatcaaactactcagtatctacaccgtgggttcgctgctttgtgtatttattaccgctccactcattcgtaataccgttcgcccaacaacattactgatgctgtacacctttatctcatttattgctctgtttaccgtctgcctgcatcccacattttatgtggtgataatatttgcttttgtcattggttttacctctgctggaggtgttgtgcaaattggcctgacgttaatggctgaacgtttcccttacgctaaaggtaaagctacagggatctattacagtgcgggcagtattgcgacctttactattccgttgattacggctcatctgtcccaaagaagtattgccgatattatgtggttcgataccgccatcgctgccatcggttttttactggcactgtttatcggcttacgcagccgcaaaaaaacgcggcatcactcgctaaaggaaaatgtcgctccgggtgggtaatgcaatattcttttcaggtcatgcaagatcttacggataaataactctttctgcgctaactaaggaaaatcgcgatcaaaaacaaactatgacatgcaatattcctggaaacataaactttatgccatgtacccagggaaaatcatcttcagtatagtaattatgtaaaccgtcggagaacaatacgtacggtaacgaaattatctttcagcaaggagctgtgaaaatgtctcaaaataaggctttcagcacgccatttatcctggctgttctttgtatttacttcagctacttcctgcacggcattagtgttattacgcttgcccaaaatatgtcatctctggcggaaaagttttccactgacaacgcgggcattgcctacttaatttccggtatcggtttggggcgattgatcagtattttattcttcggtgtgatctccgataagtttggtcgtcgggcggtgatattaatggcagtaataatgtatctgctattcttctttggtattcccgcttgcccgaatttaactctcgcctacggtctggcagtgtgcgtaggtatcgctaactcagcgctggatacgggtggctaccccgcgctcatggaatgctttccgaaagcctctggttcggcggtcatactggttaaagcgatggtgtcatttgggcaaatgttctacccaatgctggtgagctatatgttgctcaataatatctggtacggctatgggctgattattccgggtattctatttgtactgatcacgctgatgctgttgaaaagcaaattccccagccagttggtggacgccagcgtaactaatgaattaccgcaaatgaacagcaaaccgttagtctggctggaaggtgtttcatcggtactgttcggtgtagccgcattctcgaccttttatgtgattgtggtgtggatgcccaaatatgcgatggcttttgctggtatgtcagaagctgaggcattaaaaaccatctcttattacagtatgggctcgttggtctgtgtctttatttttgccgcactactgaaaaaaatggtccggcccatctgggctaatgtatttaactctgcactggcaacaataacagcagccattatctacctgtacccttctccactggtgtgcaatgccggagcctttgttatcggtttctcagcagctggcggcattttacagctcggcgtttcggtcatgtcagagttttttcccaaaagcaaagccaaagtcaccagtatttatatgatgatgggtggactggctaactttgttattccactgattaccggttatctgtcgaacatcggcctgcaatatatcattgttctcgattttactttcgcgctgctggccctgattaccgcaattattgtttttatccgctattaccgcgttttcattattcctgaaaatgatgtgcggtttggcgagcgtaaattttgcacccggttaaacacaattaagcatagaggttaaaggagttaattatggatgttaccgcaaaatacgaattgattgggttgatggcctatcctatccgccacagtttatcgcccgaaatgcagaataaagccttagaaaaagcgggattgccatttacctatatggccttcgaagtggataacgatagctttcctggagcaattgaaggattaaaagccctcaaaatgcgcggaactggtgtatcgatgccgaacaaacaactggcgtgtgaatatgttgatgaattaacaccagctgccaaactggtgggggccatcaacaccatcgttaatgatgatggctatctgcgtggctataacaccgacggcacgggccatattcgcgccattaaagagagcggttttgatatcaaaggcaaaacgatggtgctgttaggggccggtggtgcctcaacggcaattggcgcgcagggggcaattgaaggtttaaaagaaattaaactctttaaccgtcgggatgagttcttcgataaagccctcgccttcgcgcagcgggttaatgaaaacaccgattgtgtcgtcacggtcaccgatctcgccgatcagcaagcctttgctgaagccctggcttccgccgacattttaaccaatggcacaaaagtgggtatgaaaccccttgagaatgaatcattggttaatgatatcagtctgttacatccgggacttctggtcactgaatgcgtgtataacccgcatatgacgaagttattgcagcaggcgcaacaagctggttgcaaaacgattgatggatacggcatgttgttgtggcaaggggctgaacagttcacattatggactggcaaagatttccctctggaatatgttaaacaggtcatggggttcggtgcctgacaggctgaccgcgtgcagaaagggtaaaaaatgaaaaccgtaactgtaaaagatctcgtcattggtacgggcgcacctaaaatcatcgtctcgctgatggcgaaagatatcgccagcgtgaaatccgaagctctcgcctatcgtgaagcggactttgatattctggaatggcgtgtggaccactatgccgacctctccaatgtggagtctgtcatggcggcagcaaaaattctccgtgagaccatgccagaaaaaccgctgctgtttaccttccgcagtgccaaagaaggcggcgagcaggcgatttccaccgaggcttatattgcactcaatcgtgcagccatcgacagcggcctggttgatatgatcgatctggagttatttaccggtgatgatcaggttaaagaaaccgtcgcctacgcccacgcgcatgatgtgaaagtagtcatgtccaaccatgacttccataaaacgccggaagccgaagaaatcattgcccgtctgcgcaaaatgcaatccttcgacgccgatattcctaagattgcgctgatgccgcaaagtaccagcgatgtgctgacgttgcttgccgcgaccctggagatgcaggagcagtatgccgatcgtccaattatcacgatgtcgatggcaaaaactggcgtaatttctcgtctggctggtgaagtatttggctcggcggcaacttttggtgcggtaaaaaaagcgtctgcgccagggcaaatctcggtaaatgatttgcgcacggtattaactattttacaccaggcataagcaataatatttcggcgggaacaccctccccgccgaactaaaaaatatattcaatcgtatttaataaaaatatttcgtgagtctctgtgcgctaattctccatttggcgtagggaaaatcacatctgaatcaggaattaacaatgaaacctgtaaaaccacctcgtattaatggacgagtgccggtcctgtcggcacaggaagcggtgaattatattcccgacgaagcaacactttgtgtgttaggcgctggcggcggtattctggaagccaccacgttaattactgctcttgctgataaatataaacagactcaaacaccacgtaatttatcgattattagtccaacagggcttggcgatcgcgccgaccgtggtattagtcctctggcgcaagaaggtctggtgaaatgggcattatgtggtcactggggacaatcgccgcgtatttctgaactcgcagaacaaaataaaattattgcttataactacccacaaggtgtacttacacaaaccttacgcgccgccgcagcccaccagcctggtattattagtgatattggcatcgggacatttgtcgatccacgccagcaaggcggcaaactgaatgaagtcactaaagaagacctgattaaactggtcgagtttgataacaaagaatatctctattacaaagcgattgcgccagatattgccttcattcgcgctaccacctgcgacagtgaaggctacgccacttttgaagatgaggtgatgtatctcgacgcattggttattgcccaggcggtgcacaataacggcggtattgtgatgatgcaggtgcagaaaatggttaagaaagccacgctgcatcctaaatctgtccgtattccgggttatctggtggatattgtggtggtcgatccggatcaaacccaactgtatggcggtgcaccggttaaccgctttatttctggtgacttcacccttgatgacagtaccaaacttagcctgcccctaaaccaacgtaaattagttgcgcggcgcgcattattcgaaatgcgtaaaggcgcggtggggaatgtcggcgtcggtattgctgacggcattggcctggtcgcccgagaagaaggttgtgctgatgactttattctgacggtagaaacaggtccgattggcggaattacttcacaggggatcgcctttggcgcgaacgtgaatacccgtgccattctggatatgacgtcccagtttgatttttatcacggtggcggtctggatgtttgttatttgagttttgctgaagtcgaccagcacggtaacgtcggcgtgcataaattcaatggtaaaatcatgggcaccggtggatttattgatatcagtgccacttcgaagaaaatcattttctgcggcacattaactgcgggcagtttaaaaacagaaattaccgacggcaaattaaatatcgtccaggaaggacgggtgaagaaatttattcgggaactaccggaaattactttcagcggaaaaatcgctctcgagcgagggctggatgttcgttatatcactgagcgcgcagtattcacgctgaaagaagacggcctgcatttaatcgaaatcgcccctggcgtcgatttacaaaaagatattctcgacaaaatggatttcaccccagtgatttcgccagaactcaaactgatggacgaaagattatttatcgatgcggcgatgggttttgtcctgcctgaagcggctcattaacaggagtataatgatggatttttctttaactgaagaacaagaactgctgctggccagtattcgcgaactgattacgactaactttccggaagagtatttccgcacctgcgatcaaaacgggacatatccgcgtgagtttatgcgggcgctggcggataacggtatttccatgcttggcgtgccggaagaatttggtggtatccctgcggattacgtcacccaaatgctggcgctgatggaagtgtcaaaatgcggtgctccggcatttttaattaccaacggtcaatgtattcacagtatgcgccgtttcggttctgcagagcagctacgtaaaacggcagagagcaccctggaaacgggtgatcccgcctatgccctggcgttgacggaaccaggtgctggctcagataacaacagtgccactaccacttacacgcgtaaaaacggcaaggtctacatcaacggacaaaaaacctttattaccggtgcgaaagagtacccgtatatgctggtgctggcgcgcgatccgcaaccgaaagatcccaaaaaagccttcaccctgtggtgggtcgactccagtaagcccggcattaagattaacccgctgcataaaatcggctggcatatgctcagcacctgcgaagtctatctcgacaacgtggaggttgaagagagcgacatggtgggcgaagaaggaatgggtttcctcaatgtgatgtacaactttgagatggagcgcctgatcaacgccgcgcgcagcaccggctttgccgaatgcgcctttgaagatgccgcccgctatgccaaccaacgtatcgcttttggtaagcccattggtcataaccagatgatccaggaaaaactggcgctgatggcgattaagatcgacaacatgcgcaacatggtgctgaaagtggcatggcaagccgatcagcatcagtcactgcgcaccagcgcggcgctggcaaaactgtactgtgcacgtaccgcaatggaagtcattgatgatgcgattcaaatcatgggcggtctgggctataccgatgaggcgcgcgtctcccgcttctggcgtgatgtccgttgtgaacgtatcggcggcggtacagacgaaattatgatttacgtagcaggtcggcagatcctgaaagactatcagaacaaataatctgcaggcggcgcagcttcttaacaaactgcgccgccagatttatccaacaagacttaccggttgaggaaattcagataggatttcttgttccgcaaaacagtttttaaattgtctacggtaatcgctgggcgaacaaccgacatggcgcaaaaacagtttggcaaagtgatcgacattttcataacccacacgccaggagatctctgcctgtgataattcagtattagtgagtgaccattttgcttccgtcatacgccgttgaataacatagttaataggggaaatacgatactctttggtaaattcatggcaaatataactgacgctggcacgaaattttttcgataactgttctaaagtgattttttcgcgataattattattcagatagaaaagaatatcttttatcagaacatcttttttaatatacccctgctccgaacgataagcatttttaaaattttcgtagtaaagaatggctaacgtataggcaaatgcatcccataacgaagatgtttggctatttttactttgcggcaaaatcacacttagctcattaaataaggtttttatgacttcttttccctgccccgcggcaattaccggacaagaatgcggttgcagtagctgattttcctcagccccctgaaactgaaagccgtacagcgcacaggtacacgtcgttgccggatcgttaacgtcagaggccaccgcatgcagcctgccgcgttctatcaccacaatgtcatccgcatgtgcgacatataacgaagaatcgatggtaaaccttgcaacccctttcttgacgtaaatcaactcggtttcattgtcatgaacgtgatgtccggactcccattttggatcatcgctaaatgcaaaacgtgaaagccgtggcgttttaccggcgacaaacagcgtttcactggcgttatcaaaacagcgttgatacatgacaacctccctattccatgagcaagcaaaaacaatatatgccggataaaatacggcgtgtattgcggttatacaaccgcgtttagcgagagctaaacaagattatttacactgaatgcaagattgtacggtcatggaataactatattgccgcaaattgcacttttgttttagcgatcgcattttttttgcaagattgttggcaaggaaaacagcttgctccgtcgaaaaccccgcaccgctatcgcacactattttcaggccatttttaccttccatcggagatggttccgtatgcgactcacaggagaaatcatgaaaataataacctgctttaagctggtgcctgaagaacaggacattgttgtcactccagaatacaccctgaatttcgacaatgccgacgccaaaatcagccagttcgatctcaatgccattgaagctgcaagccagctcgcaacagatgacgatgagatagccgcgctgaccgttggcggctcattgttgcagaactcgaaagtgcgcaaagacgtgctatcccgcgggccgcacagcctgtatttggtgcaggatgcgcaacttgaacatgcactgcctctcgataccgcaaaagcgctggcggcagcaattgaaaagatcggcttcgatttactgatctttggtgaaggttccggcgacctttatgcccagcaggttggcttgctggtcggagaaattctgcaacttccggtgattaatgcagtgagtgctattcagcgtcagggcaatacactggtgattgaacgcacgcttgaagatgatgttgaagttattgaactctctgttccagccgtgctctgcgtcacctccgatattaacgtgccacgcattccttcgatgaaagccattctcggcgcgggtaaaaaaccggtaaatcagtggcaggcaagtgatattgactggagccagagcgcgccacttgctgaactggtcggcattcgcgtaccgccgcaaacagaacgtaagcacatcattatcgataacgattcgccggaggccattgccgagctggcggaacatctgaagaaagccctgaactgaagcctacggagaagaaacgatgagtcaattaaacagcgtctgggtctttagcgataatcctgaacgttatgctgaactgtttggcggcgctcagcaatggggccaacaggtgtatgccattgtacaaaataccgaccaggcgcaggcagttatgccttatggtccaaaatgtctttatgttcttgcgcaaaacgacgcgctgcaacgcactgaaaattacgccgaaagcattgctgccctgctgaaagataaacaccccgctatgttgctgttggccgcgacgaaacgtggtaaagcgctggcagcacggttaagtgtgcaactgaatgcggcgctggtgaacgatgccacggcggtggatattgtcgatggtcacatttgcgccgaacaccggatgtatggcgggttagcgttcgctcaggaaaagatcaacagcccgctggcgatcattacccttgcacccggtgttcaggaaccgtgcaccagtgatacctctcatcagtgcccgacagaaacggtaccttatgttgctccgcgtcatgaaattctctgtcgcgaacgccgtgcgaaagccgcaagcagcgtggacctgagcaaagcaaaacgtgtggttggcgtcggtcgtggactggcggcgcaggatgacctaaaaatggtccacgaactggcggcggtgctgaatgctgaagtcggctgttcacgtccaattgccgaaggcgagaactggatggagcgtgaacgttatatcggtgtctccggcgtgttgctgaaatccgatctctacctgacgctggggatctccgggcagatccagcatatggttggcggcaacggcgcaaaagtgattgtcgccatcaataaagataaaaatgcgccaatcttcaactatgccgactacggtctggtgggcgatatctacaaagtcgtccctgccctgattagccagttgagccgctaattcccctttcaaccacatctcccgctgtaaacgcagcgggaagggagcataacgcatgtcggatgacaaatttgatgccattgtggtcggtgcgggcgttgctggtagcgttgccgcactggtcatggcacgagccgggctggatgtcctggtgatagaacgcggcgacagtgccggatgtaaaaacatgaccggcgggcgtctttatgcccacacacttgaagcaatcattccaggctttgcagtatcagcgccggtagaacgcaaggtcacacgcgagaaaatctccttcttaaccgaagaaagcgccgttaccctcgattttcaccgcgagcagccagatgttccgcaacacgcatcttataccgtattgcgtaatcgtctggacccgtggttgatggaacaagccgagcaggcgggcgcgcagtttatcccaggcgttcgcgtcgacgcgctggttcgtgaaggaaacaaggtcactggcgtgcaggctggggatgatattctcgaagcgaatgtggtgattctggctgatggcgttaactcgatgcttggccgctcgctgggaatggttcccgcttccgatccgcatcattacgctgttggtgttaaagaggttattggcctcacaccagaacagatcaacgatcgctttaatattacgggcgaggaaggtgccgcctggctgtttgccggttccccttctgacggcctgatgggcgggggatttctctataccaacaaggattccatatccttggggctggtttgtggattgggtgatatcgcccatgcgcaaaaaagcgtgccgcaaatgctggaagattttaaacaacaccccgccattcgcccgctgattagcggcggcaaactgcttgaatattccgcgcatatggtgccggaaggcggtctggcaatggtgccgcaactggttaacgagggcgtgatgatcgttggtgacgccgcaggcttctgcctgaatttgggttttacggtccgcggcatggatttagccattgcatcggctcaggctgccgccacaacggtgatcgccgccaaagaacgcgcggatttctccgccagcagtctggcgcaatacaaacgtgagctggaacaaagctgcgtcatgcgtgatatgcagcattttcgcaagatcccggcgctgatggaaaacccgcgcctgtttagccaatacccacgaatggtagccgacatcatgaacgagatgttcaccatcgacggcaaaccaaaccagccggtacgaaaaatgatcatgggacatgcgaagaaaattgggctgatcaacttgctgaaagatggcattaagggagcaaccgcgctatgagccagaacgctacggttaacgtcgacatcaaattaggcgtcaataaattccatgttgatgagggccacccgcatatcattctggcggaaaatcccgatatcaatgaattccataaattaatgaaagcctgccctgccggactttataagcaggatgacgcaggaaacattcattttgattccgccggttgtctggagtgcggcacctgtcgggtgctgtgcggtaacactattctcgaacagtggcaatatcccgcaggcaccttcggtattgattttcgctacggctaatcatgcatcccacaggcccgcatctcgggcctgatgttctgtttcgagagtccaacatgaaagtgacattaacgtttaacgaacaacgtcgtgcggcgtatcgtcagcaagggttatggggcgatgcttcgctggccgattactggcagcagaccgctcgtgcgatgccagacaaaattgccgtggtcgataatcatggtgcatcgtacacctatagcgcgctcgatcacgccgcgagctgtctggcaaactggatgttagcgaagggtattgaatcaggcgatcgcatcgcatttcaactgcctggctggtgtgaatttaccgttatctatcttgcctgcctgaaaatcggtgcagtttccgtgccgctgttgccttcctggcgggaagcagaactggtgtgggtgctcaataagtgtcaggcaaaaatgttctttgcaccgacgttgtttaaacaaacgcgtccggtagatttaatcctgccgctgcaaaatcagcttccacaactacaacaaattgtcggcgtggacaaactggctcccgccacctcttccctctcattaagtcagattatcgccgacaatacctcactgaccacggcgataacgacccacggcgatgaattagctgcggtgctgtttacctccggaaccgagggtctgccaaagggcgtgatgctaacgcataacaatattctcgccagtgagcgggcttattgcgcgcgactgaatctgacctggcaggatgtctttatgatgcctgcgccacttggtcacgcaacgggctttctgcatggcgtaacggcaccattcttaattggcgctcgcagcgtgttgttagatattttcactcctgatgcgtgtctcgcgctgcttgagcagcagcgttgcacctgtatgctcggcgcaacgccgtttgtctatgatcttttgaatgtactagagaaacaacccgcggacctttcagcgctgcgtttctttctttgcggcggaaccacaatccccaaaaaagtggcgcgtgaatgccagcagcgcggcattaaattattaagtgtttatggttccacagaaagttcgccgcatgcggtggtgaatctcgatgatcctttgtcgcgctttatgcacaccgatggttacgctgccgcaggtgtagagattaaagtggtcgatgacgcacgcaagaccttaccgccaggttgcgaaggtgaagaagcctcgcgtggccccaatgtgtttatggggtattttgatgaacctgaattaaccgcccgtgccctggatgaagaaggctggtattacagcggcgatctctgccgtatggatgaggctggctatataaaaattaccggacgcaaaaaagatattattgtccgcggcggcgaaaatattagcagccgtgaagtggaagatattttattgcagcatcctaaaattcacgatgcctgtgtggttgcaatgtccgatgaacgtttaggtgaacgatcatgcgcttatgtcgtgctgaaagcgccgcatcattcattatcgctggaagaggtagtggctttttttagccgtaaacgggtcgcaaaatataaatatcctgaacatatcgtggtaatcgaaaaactaccgcgaactacctcaggtaaaatacaaaagtttttgttaagaaaagatattatgcggcgtttaacgcaggatgtctgtgaagagattgaataagtttcatcttcggggatcacataaccccggcgactaaacgccgccggggatttattttatttcttcagttcagccaggcttaaccaggtttgcaccacggtgtccgggttcagagacaggctatcgatcccctcttccatcaaccatgcggcaaagtcttcgtggtcggacggaccctgaccgcaaatcccgacatatttgccctgtttcttcgcggcacggatagccatcgacagcagtgctttcaccgcatcgttgcgctcatcgaacaattcagacaccacgccggagtcacggtccagaccgagcgccagctgcgtcatatcgtttgagccaattgagaagccgtcgaaatattcgaggaactgctcggccagcaaggcgttggacgggatttcacacatcatgatgattttcagcccgttctcgccacgtttcagcccctgacgcgccagttcttcaaccaccgctttcgcctgatctacggtacgcacgaacgggatcatgatctcaacgttggtcagtcccatgtcgttgcgcacacgtttcactgcttcacactccagcgcgaaacagtcgcggaagctgtcggaaacatagcggcccgcgccacggaagccgagcatcgggttctcttcatctggctcgtaacgctcaccaccgaccaggttggcatattcgttcgatttaaaatcagagagacggacaatgacgcgcttcggataaaacgcggcacccagcgtcgcgatcccttcagtcagacgaccaacgtaaaattcacgcggagaatcaaaacctttcatcatctcgcggatttcgttttgcaactgcggttcctgatcgtcaaactcaagcagtgcgcgtgggtggacgccaatcatacggttgatgataaattccagacgcgcaaggcccacgccttcgttcggtaggcaggcgaagtcgaaagcacggtccgggttaccgacgttcatcatcactttcaacggcagatccggcatcgtttctacgctggagcttttcacgctaaattccagcaactccgcatagacgtaaccggtatcaccttcggcacaagaaacagtgacgttctcaccgtctttcatccgttctgttgcatctccacagcccactaccgccggaatgcccagttcacgagcgatgatcgccgcgtgacaggtacgaccgccacggttggtgacgatggcagatgctttcttcatgatcggttcccagtccgggtcggtcatgtcagtaaccagcacgtcgccaggttcgatgcggttcatttcgctgatgtcatggatgactttcaccggacccgcaccgatgcgatgaccgatagcacggccttcggcgataatcttaccctgtgaatgcagcgtataacgctccatgacctgaccgcgtgagcgcacggtttccggacgcgcctgcacaatgaacagtttaccggtgtggccatctttcgcccactcaatatccatcgggcgaccgtagtgtttctcaatttgtacggcctgttttgccagttcctgcacttcttcgttggtcagcgagaagatgtcacgctgttcctgcggtacgtcttcgattttaacctgcttgccgtgctcctgggtcggcgcgtaaaccatgcggatttttttcgaccccatggtgcggcgcacgatagccgggcgattcgccgccagtgtcggtttatgcacgtaaaactcatccgggttaaccgcaccctgcacgaccatctcaccaaggccccatgcggaagtgataaacaccacctggtcaaagccggattcggtatcaatggagaacatcacgccagatgatgcgaggtcagagcgcaccatccgttgaacaccggcggagagcgccacaccacggtgatcgtaaccctggtgcacacgataagagatggcgcgatcgttaaacagagaagcaaatacatgtttcactgccacgagaacggcgtcaaaaccctgaacgttgaggaaggtttcctgctgaccggcaaaagaagcgtccggcatatcttctgcggtggcggaggagcgcaccgcaaaagaggcgttttcgtcatcggcggaaagctgtgcataggcttcgcggatggcgttttccagctcaggctggaagggagtgtcgataatccactggcggatttgcgcgcccgctttcgcaagctgagtaacatcgtcaatatccgttttatccagcagttcataaatgcgctggtttacgccgctttggtccagaaactggttaaacgcgtcggcggttgtggcgaaaccattcggaacggaaacacccattccggaaagattagtaatcatttcacccagggaggcatttttgcccccaaccctgtctacatcattcatgccgagttggttataccaaagcaccagcggtgacgagccattgttggacatcgaacaatccttttgtgataaatgaacggtttgagaaacacatttctgcgcatttatctttgcatatttaaccggatgaaaaaaacggtgaatcgttcaagcaaatatatttttttactttttaagactgatcccagcgttgcgcaaatctgctctcttcgacaatttccacataaaccatcggtataaacgaaaccataaaaatgaaatgctgttttcataaaaaataaaattgaaggttcattttataaaccagacataacgttctacgcttctgtgcgtttttaatttatgctttcatagaattatgtctgcatcacgggaagaacaaaatggataatgctgttgatcgccacgttttttatatttctgatggtacggcaataactgcggaggtattaggacacgcagtaatgtcacaatttcccgtcactatcagcagcatcacgctgccgtttgtcgaaaatgagagccgtgcacgggcagtgaaggatcagattgacgcaatttatcaccagacaggcgtgcgcccgctggtcttctactccatcgtgttgccggagattcgcgccatcatcttgcaaagtgaaggcttttgccaggatatcgttcaggcgctggttgccccgctacaacaagagatgaaactggatccaacgccgattgctcatcgtacccatggccttaaccctaataatctcaataaatatgatgcgcgcattgcggcgattgattacaccctcgcccacgatgacggcatttcgttgcgcaatctggaccaggctcaggtgatcctgctcggtgtttctcgctgtggtaaaacccccaccagtctgtatctggcaatgcagtttggtatccgcgcggcaaactacccctttattgccgacgatatggataatctggtgctacccgcgtcgctcaaaccgcttcagcataaattgttcggcctgactatcgacccggaacgtctggcggcgattcgcgaggaacgtcgggagaacagtcgctatgcctcgcttcgtcagtgcaggatggaagtcgcggaagtggaagccttgtaccgtaaaaatcagatcccgtggattaacagtaccaattattcggtagaagagattgccaccaagatcctcgatatcatgggccttagtcgccgaatgtactagagaactagtgcattagcttatttttttgttatcatgctaaccacccggcgaggtgtgacacacctcgcacttgaaatcagcagcgattggtttatcgtgatgcgcatcacttcccggcagtcctgccgtagaagcaacaaatttctgagacttgtaatgaacagaactgacgaactccgtactgcgcgtattgagagcctggtaacgcccgccgaactcgcgctacggtatcccgtaacgcctggcgtcgccacccatgtcaccgactcccgccgcagaattgaaaaaatactgaatggtgaagataagcgactgttggtcattattggcccctgctcgatccacgatctcaccgctgcaatggagtacgccacccgtctgcagtcgctgcgcaaccagtaccagtcacggctggaaatcgtaatgcgcacctattttgaaaaaccacgaactgttgtcggctggaaaggactaatctccgatccagatttaaacggcagctatcgggtaaatcacggtctggagctggcgcgcaaattacttttacaggtaaatgagctgggcgtcccaaccgcgaccgagttcctcgatatggtgaccggtcagtttattgctgatttaatcagttggggcgcgattggcgcacgtactaccgaaagtcagatccaccgcgaaatggcttcggcactctcctgtccggtaggttttaaaaatggtaccgatggcaatacgcggattgctgtggatgctatccgcgcagcccgcgccagccatatgttcctctcgccagacaaaaatggtcagatgaccatctatcagaccagcggcaacccgtatggccacattattatgcgtggcggcaaaaaaccgaattatcatgccgatgatatcgccgcagcctgcgatacgctgcacgagtttgatttacctgaacatctggtggtggatttcagccacggtaactgccagaagcagcaccgtcgccagttagaagtttgtgaggatatttgtcagcaaatccgcaatggctctacggcgattgctggaattatggcggaaagtttcctgcgcgaaggaacgcaaaaaatcgtcggcagtcagccgctcacttacggtcaatccattaccgacccgtgtctgggctgggaggataccgaacgcctggtcgaaaaactcgcctctgcggtagatacccgcttctgaatgcgtgcccattcctgacggaatgggcatttctgcgcaacttgttgtcttctcaacaaattactgcttgctctggtcagccataatattgataataagaatcattgttatatcaattattattaatttttatgcgttatacggatagcagaaaactcacgcctgaaacggatgccaatcacaagaccgcttccccgcagcctattcggcgaatttccagccagacactgttaggtccggatggcaaactgattatcgatcatgacgggcaagaatatctgctccgtaaaactcaggctggcaagctgctgttgaccaagtagcctttaactcgagcagctgacttccagccgtttaccccagtcaggtggacgactgacatagtcatcatctctgtcgctgaaaggatttcgcaacgcctcatgcaggcggtgcaattccgtcatatcacccttttctgccgcttcaatcgcccgttgcgccaaccagttgcgcaataccagagcggggttaacgctttgcatcagttgctgacgctcactatcgctaacctcgtcttgttgcaaacgcccccgataacgggcaaaccagtcatcaaatgccgcacgatcaataaactcatcacgtagcggtgacgccgcgctgtgctgctcggtcagactcagcatgcggaatgtgcgggtataatcgctgcgctctcgcgccatcagactgaataattcattcagtagcgcgttatcctctttttgctccgtcatgaagcccagtttctgccgcatccgttctccataatgcgtcaacaaaacctgctgatagctgtccagggcctcattcagggcatctacggcaacaaatggcgacaatgtctgcgccagacgctgtaaattccacaacgcgacggcaggttgattatcaaagctgtaacgcccttgatgatccgagtgattacaaataaaaccgggttcgtaatcatcaagaaaaccaaacggcccgtaatcaagcgtcagccccagcagcgacatgttgtcggtattcatcaccccatgagcaaagccgaccgtctgccattgggcaattaacgacgcggtacgtgcgacaacatcgctaaaccagagacggtatttgtcctcatcatctgcaagatgtgaccagtaatgacgaatagcaaagtcagctaactgacgaaccttttccgactcgcggcggtagtaaaaatgttcgaaatgaccaaagcgcagatgacttggtgccacacgcatcagcatcgcgcctggctccgccgtttcccgatacactggcgaatcgctggtgacgatacttaacgcgcgggtcgtcggaatgcccagataatgcatcgcctcactggcgagactttctcgtatcgtcgaacgtaaaaccgcccgtccatcacccattcgcgaataaggcgtcaggccagcacctttcagatgccagtccattgtagtgccatcagcaagcagttgttcgccgagtaaaatgccgcgcccatcacccagttggcccgcccagacgccgaactgatgaccactgtaaacctgcgccagtggtgacataccaggcagtagggcttcgccgccccagacacctgcgccatttttaaacagcgacgatggaatactcagcgtgttagccagttcggtattatgccaaatcagccgggcattatttaaaggcgtaggggaaagtgctgtataggtttctggcaattcatcgcgccagcgggtaacaaaagacagggtcatagatcctcctgtttgatagtgtagacggttactctcgtcttaaacaccagcaaacagaagggttatcgctgaaccaacgtcgttatctgatttatgggaacggcaggccacaggcatccctggagagcatggaaatcgaagggggtaatctgtgccaatatttctgccgtatcaatgcctcccgcaatgatgcaattgcaacaaggggaaatttgcgcctggatcgcacgaataaacggttcgaaggagcggtgcgtgatttgttgctgaataaaacttttatccagcatgacgcgggtgaaaagaccatcaaaaaccgctttcattgtgctattgcctgctcccaaattacctaacacaaggggatacacttgcgataaggataaaagaccgcgattatcttttccttcattgagatgcgggtaattctcattaatcaacagttcaataaacggatattttaatagttcgcctgcgtaattatccctctctaataataatgtagccacttgtggcgttaaattaagccaggcaaagagtttatgttgaataaaaaaatgttggcatgattttagtaattccaactgctctgaaaataattgccaatgttgctcctcggtaagttgcgctataacccgactcgtcgggatacgaaccgtaccatcttcactggagaaatgggtaattaactcaacgccgacaaggacttgctggttgtctcttatcggcaggaaatagcaatcagaatgataaagattctccaaaaaaatcttcatggtaaccgtccctctcgaaggatgtttttcagtatccggctaaaagggatgaggccataagacataacaattacagaaggagtaactttcatttgttccatgttaaccactttttcaggggtcctttttttagattatcctgattataaacgaataatccatttacggaatttttgtctgcaaaatactactgtattcaggagtaaatggacggcgatgtatcatcgccgtccatttttcgacatactagattcgtctcgcctgccagaaatttttctgccaatagacattatcaagtgaggaacgcatcactcccttgctggtagaggcgtggataaattggttgttggtatcgtaaatacctacatgcaaaccattttgtccggaccccgttttgaaaaagaccaggtcacctggcagcaactcgtctttatcaatttgcgtgccaatagaggcttgttgtttggtttcacggggcagctgcaaatcgaaacgatcgcgcatcgtcacaaccacaaatcccgaacagtccacaccgcgccgcgtcatgccaccataacgatacggcgtgccatgccagctttgtagctggtcgttcaaaccggcaataacggtaatcgaatcagaaagtctggcatttggcggcggtgctttatggtggctacacccggccagaagcagtgctgtgatcaaaataaggcagaaacgcattccgtacggttcctctgttttttattcttgcattaatttagcgtcgtaattacccgattttcaagatactaatgaaatcagatggtcgaaatcagcattctgtgaccttcgatatccagacggcgaaaattcatcccataggcctgcgccagatttggcggcgtgagcacctcttccctgcgtccactggccagcatttttccaccttttagcaaccacgcccgatgcgcatgacgcaatgtgtggttgagatcgtgactgctcatcacaatcgccagtccttgctgacacagcgcgctcagaattttgtctaacgcactttgttgcgcaacatcaagactgttcatcggctcatcaagaagcagcaattggcctgcgggattggcttgtggtgtgatttgcaacaccaccgcagcaagacgtacgcgttgccattcaccgccggaaagttgattggtgctacgtccgagtttgtcatcaagagccagcgcccctgcgacatcattcagtagttcggtacgcgttttatcgtgctgatgcagtgtcaggtagtgccagaccggcgttgcaaacggcggcgtctgctgttgtgaaagataggcgcgatgcagcgcgagttttgttgcggaccatgcttccagtggttgccccgcgaactgaatgcttcccttaccgctggtcattccggccattcgcgccagtaaggtactcttacccgcgccattcggccccaccaggtgcaggatctccccagcccgaacctcgccagaaagcggccccaggcgggtagattccgcaacatcttgtaactgcatcacaatagacattattttgccaacgccagtttaatgctttccatcacaatgggatcttccggcgtcatatccggggaaaaacgctggatgacttttccgtccctgccaaccaggaatttttcaaaattccataaaatatcatccgggtacagcggtgcacggcctttgctgaccatacgggcatagaatccgctctcttccggcgcgactgcggtcggcgctgcggcaatcaatttttgatacagcggatggcgtccttcgccattaacttcaatcttactgaacatcgggaacgtcaccccccatgtggtggtacagtaagttttaatctcttcatcgctgcccggttcttgttccagaaactggttgcacgggaatcccagcaccataaaacctcgatcgacccaggctttctgaatattctccaactgctcatattgcggcgttaagccacactttgaggcgacattgacaatcaacagcacattaccggcgaacttctccagcgtggtcacttcaccgtcgatatctttcactacggtcgtcagaatggaatcttgcatcgtttctcctgggtgtggtcagtaaaaatcttagcttttaatcatagaccgtctttttgcggctaacgtcctgcttttaacaataaccagataaacaccggcgcacctaacgttgcggtgaccacgccaataggcagctctgcggcagctaatgccaggcgcgctacaatatcggccagcagcaatgcgctcgcccctgccagcgcgcagccgggaagtaatacgcgatgatcggttaaaccacacaaccggagaatatgggggatcaccagaccaataaagccgatagcacccgccagcgccacactgacgccaaccatccagccggtcgctgccaccagcacattgcgccagaaccacaggggtaaacccagttgccgcgccgagatctcgccaagtgctaacatattcatcggcctggactgacaacagatccacaacaacacggggatcaatgccagcatcagccagctttgccgccagtctacgccgccaaaaccgcccatcatccagtacatcagctgacgcaaatcaactgaggtggaaaagtagatagcccacgtcattagtgcgctacagataatccctaatgcaacgccagccagcaataaccgactggtcgaaagatgacgacgggcgaaacgtaagagtattaaagtgatgataagcgcgccagcaatcgcacacagccctagcgcccagttggggagttgcccttgcccaagcaataccgcggcgataagccccacgcctgcgccgttagagacgccaagtagtccaggttctgccagaggattttcaaacaacgcctgcattacagcgccggatatagccagcgccgcaccaaccagcaatacagccagcgtacgtggcaggcgaatttgccagacgaacagttcgccacgaggagtaaaccagtcacctggcgagatccattgttcaccggcgcaaaggcttaagagaagcgccagcagcatcaaaactgacaggcataataaccagcgaatattttgtcgctgttgttggcgggcaagtgtcagcatggtatccgttctgctgaagtgtcatggcgttgattttacggtgactcttcgacagtgaaaagaaaaaaggccgcagagcggcctttttagttagatcagattactcgtctttgggcgaagcgttttcgacccggctttttaacttctgcccgggtctgaaggtcaccacgcgccgtgctgtaatgggaatatcctcgcccgttttcgggttacgtcccgggcgttgattcttatcacgcagatcgaagttaccaaaaccagagagtttcacctgttcgccgttttccagagcgcgacggatctcttcgaaaaacagttcaaccagttctttggcatcccgcttgctaagcccaagcttatcaaacagatattctgacatttcagcttttgtaagcgccataggttcaatccctcaatgatgcctggaatcgctcttttaatgcctctacacatttggcgacggtagcggcaatctcctcttcttcgagtgtacggctggtatcttgcaggatcaggcttatggcgaggctcttatacccctccgcaacacccttaccgcggtacacgtcaaataagtttacgccaactacctgatttacgccaactttcttacattcggataaaatatccgctgcgggaacgttttctgcgaccaccaccgcgatgtcacgacggttcgccgggaagcgagaaatctcgcgcgcctgaggcaccacgcggtctgcgagcttgttccactccagttcgaacaccagagtgcgaccgttaagatccagtttacgttccagttcaggatgaacaaccccaacaaaaccaatacgttcacctttcagataaatcgctgcggattgccccggatgcagtgccggattcgcttctgcacggaactcaacctcattcagtttaccggtcaggtcgagaacggattcaagatcgcctttcaaatcatagaaatcaacggtctcttttgccaggttccagtgctcttcgtaacggttaccgcaaatcacaccggctaacatcagatcctgacgaatgcccaacggtgcctgagtatctggtacgaaacgcagaccgctttcgaaaatgcgcacacggttctgctgacggttctggttgtacaccacggttgccagcaggccagtccacagagaaagacgcattgctgacatttcaacagagatcgggcttggcagcagtaaggcttcaacgcctggatggatcatctgctgcactttcggatcaacgaagctgtaggtgatcacttcctgatagcctttgtcgttgagcagcgttttcacgcgcttgagcgacaggtcagcttcacggtgagtacccataatcaggcttgcctgtaccggctcatccgggatgttgttgtagccgtaaacacgcgcgacttcttcaaccagatcttcttcaatctccatatcgaaacgccagctcggcgcaactgcctgccattcgtctttgccttcggtcacttcgcagccgagacgacgcagaatgtcagttacctgctcatccgcaatatgatggccgatcaggcgatccagtttgctacgacgtagagtgatggttgcacgcttcggcagcgttgcttcgttggtgatatcaattaccgggccagcctcaccaccgcagatgtcgatcagcagacgggtcgcacgttccatcgctttgtgctgcagtgccggatcaacgccacgctcataacggtgagacgcatcggtatgcaggccatgacgacgagcacgaccggtgatagacagcgggctaaagaacgcgcattccagcagcacgttttgtgtttcgtcattcacgccagagtgttcgccaccgaagatgccgcccatcgccagcgccttgttgtggtcggcgatgaccagagtgtcagcattcagcttcgcttcagtaccgtcgagcagcaccagcgtttcgccctctttcgccatccgcaccacaatgccgccttcaatgcgatctttatcgaaagcgtgcatcggctggcccagttcgagcagcacatagttggtgacgtcaacaactgcatcgatagaacggatcccgcaacgacgcagtttttctttcatccacagcggagttggcgctttaacgttaatgccttttaccacacggccaagataacgcgggcaggcttccggcgcttcgactgtaatcggcagcgtgtcgtcgatggtcgcaccaaccggaacgatttccggttgaaccagcggcagctggttcagcacggcaacgtcacgcgcaacaccaatgatgcctaagcagtcggcacggtttggcgtcacgctgatttcgatggtgttgtcatcaagtttcaggtattcacggatatcggtgccaatcggcgcatccgcaggcagttcgataatgccgctgtgatcgtcagaaatgcccagttcagagaaggagcacagcatcccttcagacggttcgccacgcagtttcgccgctttaattttgaaatcacccggcagaacagcaccaatggtcgctaccgctacacgcaggccctgacggcagtttggcgcaccgcagacgatgtccagcaggcgatcgccgccgacattcacttttgtcacacgcagtttgtcagcgttcggatgctgcgcacactcaaccacttcaccaacgaccacgccgtggaagctgccggcaaccggttctacaccgtcaacttccaggcccgccatagtgatttgatttgccagcgcatcgctatcaatcgccgggttcacccattcgcgtaaccacagttcactgaatttcataatctattcctgccttatttaaactgtttgaggaaacgcagatcgttttcgaagaatgaacgcaggtcggtgacgccgtaacgcaacatagtcagacgctccatccccatcccgaaggcgaaaccagagtaaacttccgggtcgatgccaacgttacgcaacacgttcggatgcaccatcccgcagcccagcacttccagccatttaccgtttttacccatgacgtccacttctgcagaaggttcggtaaacgggaagtaggaaggacggaagcgaatctgcaaatcttcctcaaagaagttacgcaggaagtcgtgcagcgtgcctttcaggttggtaaagctgatgttggtatcaacaatcagaccttccatctgatggaacatcggcgtgtgagtctggtcgtagtcgttacgataaacacggccaggcgcgatgatacgaatcggtggctgctgggctttcatggtgcggatctgtacgccagaggtctgggtacgcagcaggcgggtagtgtcaaaccagaaagtgtcgtggtcagcgcgcgccgggtggtgaccaggaatgttcagagcatcgaagttatgataatcgtcttcgatttccggcccggttgccacggtaaagccaagctcaccgaagaaactttcgatacggtcgatggtacgggtaaccggatgcagaccgccgttttcaatgcgacgacctggcagagagacatcaatcgtttccgccgccagacgcgcattcagtgcagcgctttccagttccgctttacgcgcattcagcgcctgctgaacctgctctttcgcttcgttgataaccgcaccagctgccggacgctcttctggcggcagctcacgcagggtcgtcatctgaagggttaagtgcccttttttacccaaatattcgacgcgcacattatctaacgcggcaacatctgacgcctggctaatggccgccttcgcactggcaaccagttctgcgagatgtgacatggttttcctcattgtgtcagtggtgacactggttcgttggacttagagcctatcccatcaggctattttacttgccattttggtcccgggctgtgctcgaaattctcacgtacttaaatacgctccggtttctccgcgctggccgtgtccagtctggctgcgacaattacacctgatgagacaggctttttatttttcaaaacgcgcatacaaaaaaagcctccactgggaggctttcaggcgctgttttccgtttctcttctcacgcgctagcctcctggattcaggtgctaaagtaaaaaaagaagcggaaaatagcagcattcattgcttgcgttaccttttggtactcttcaaaagacctttattgaaaaggctacggcgataaaagtcaatgttttgatggcgttgaaacgaaaagagggagactagctccctctttcaactggcttatgccagagctgctttcgctttttcaaccagagcggtgaacgctactttgtcgaatactgcgatatcagccaggatcttacggtcgatttcaacagaggcttttttcaggccattgatgaatttgctgtaagaaataccgttctgacgtgctgctgcgttgatacgcgcaatccacagttgacggaactgacgcttacgttgacgacggtcacggtaagcatactgaccagctttgataacagcctggaaggcaacgcggtatacgcgagaacgcgcaccgtagtagcctttagcttgtttcaaaattttcttgtgacgtgcacgtgcaataacaccacgttttacgcgagccatatgtgctctcctgtatctatattctaattaaaaagttaaaaacgttaacggcttatgcgtacggcaggcacgcgattaccaggcccagatcgcctttggaaaccatggctttcggacgcaggtgacgtttacgtttggtcgcttttttggtcagaatgtgacgcaggttagcgtgcttgtgcttaaaaccacctttaccggtttttttgaagcgcttagcagcaccgcgtacggtcttaatttttggcattttaataacttccacttcgcattgttaataaacgaaacaaaggcgaacaaagcctgtgaagcccgaaggctccacagacagtgctacttgaaggccttactgtttcttcttaggagcgagcaccatgatcatctggcggccttcgatcttcgttgggaaggattcgaccactgccagttcttgcaaatcgtctttcacgcgattaagcacttccataccgatttgctggtgcgccatctcacgaccgcggaaacgcagcgtgattttggctttatcaccctcttcgagaaagcgaatcaggctgcggagttttacctgatagtcgccttcatctgtaccaggacggaatttaatttccttaacctggataactttttgctttttcttctgttccttagaagacttgctcttttcatagaggaatttgccgtaatccattatacgacaaaccggcggctcggcgttagggctgatctcgactaagtctactccggcttcttctgctttctccagagcttctctcagactcacaataccaagctgctcgccttccagacctgttaagcgaacttcctgggcgcgaatttcgccattgatacggttagggcgcgccgtttgaactcgttttccgcctttaataccttattcctccaattgtttaagactgcggctgcgaatctcttgttgcagcttctcgatcacttcatttacgtccatgcttcccaggtctttaccacggcgggtgcgaacggcaactttgcctgattccacctctttatcaccacagaccagcatatatgggacgcgacgcaaagtgtgctcgcggattttaaagccaatcttctcatttctcaagtctgctttaacacgaatgcccgcatttgatagtttttgcgtcaattcgttaacgtattcagactgtgaatcggtaatattcatgataacaacctgaaccggcgcaagccaggtcgggaagaaaccagcgaactcttcggtcaggataccgatgaaacgttccatcgaccccagaattgcgcggtgaatcattaccggtactttacgttcattgtcttcgcctacataagaagcgctcagacgagacggcaaagagaagtccagctgtactgtaccgcactgccatgcacgatcgaggcagtcatacagggtaaattcaattttcggaccgtagaaagcgccttcacccagttgatattcaaacgggatgttgttttcttccagcgcaaccgccaggtccgcctcagcacgatcccacatttcgtcgctgccaatacgtttttcaggacgagtggagagtttgacgacgatcttctcgaagccaaaagtgctgtacatatcatagactaaacggatacatccgttaacttcatcgcgaatttgttcttcagtacagaagatatgcgcgtcatcctgggtaaatccacgcacgcgcatcaggccatgcagcgaacctgacggctcgttacggtggcagctaccaaactcggccatacgcagcggcagatcgcgataagacttcagcccctggttgaaaatttgtacgtgacccgggcagttcatcggcttaatgcagtattcacggttctcagaagatgtggtgaacattgcatctttgtagttgtcccagtgaccggttttttcccacaggacacggtccatcatgaacggacctttaacttcctgatactggtactctttcagtttagaacgaacaaacacttccagttcacggaagatggtccagccgtcgttgtgccagaataccatacccggcgcttcttcctgcatatggtacaggtcgagctgtttaccgattttacggtggtcgcgtttcgcggcttcttccaggcgctgcaggtaagcgttaagtgcttttttgtctgcccacgccgtaccgtaaatacgttgcaacattttgttgttgctgtcgccacgccagtaagcccctgccgttttcattagtttgaaatgatggcagaaacgcatgttcggtacgtgcggaccgcggcacatatcgacatattcttcatggaagtacagacctggcttgtcatcatgggcgatgttttcgtcaagaatggagactttgtagctctccccacggttggcgaaagtttcacgcgcttcgtgccagctgactttcttcttaatgacgtcgtagtttttctcagcaagctcatgcatccgcttctcgagtgcttcgacatcttcctgggttaacgtgcggtcaagatcaacgtcgtaataaaaaccgttgtcaataaccgggccgattgccattttggtatgcggccaaagttgtttaatcgcgtgccctaacaggtgcgcacaggagtgacgaatgatctccagaccttcttcgtctttggcggtaatgatcgacagttgtgcgtcgttttcaatcagatcgcaagcatcaaccagttcgccattaacgcgccctgcgatacaggctttcgccagacctggaccaatgtccagcgcaacatccatggggcttacagcgtgatcgtaatggcgttggctgccatcaggaagagttataacaggcattttatatccttatttgcagtggtgacccacacgaaagatcacatacaaagaaaaatttgtttattaacagttcattgcgaaaccatctagccaacaaatgctaaattggttcgcaatcaggtacacaaatgaaagacattaacctctcaccttccacccggttgagcgatgttaacactaaaaaaagggagattgtacctttccgtttcacattgattcgattcgcaattcgtttgtagtgagtacaccagcaaaacgcttaaagaacaactgataacatcacggtgcgtctgaaaggtttactgcgagcggatttacagcagcataaactgaatccagcaaagttcgttgcgtgatttggcggtagtattttaaacgctcatgagattaatgacgaagtggtcatatcacaatgataaaagtgacacaattcttataacaatttttcgtgcacatttcgttctggcgataataattaatcatcatcctcaaaacctccagatatatataaggcgaacagattatgagtcaaaacgatatcattatcagaactcattataagtctcctcatagattgcacatcgatagcgacataccaacaccttcatcagagcctattaatcaatttgcgcgccagctcatcaccctacttgatacctctgacttaagttcgatgctgtcatactgtgttactcaggaatttaccgcaaactgtcgaaaaatatcacaaaattgttattccactgccctttttaccattaactttgccacttcacccatccatacagaaaatatactcattacattacactataaaaaagaaatcatttccttattactggaaaccacgcctattaaagctaaccatttgcgaagcatactggattatattgaacaggaacagttaactgctgaagatcgtaaccattgtatgaaactgtctaaaaaaatccatagagaaaaaaactatacacccaacagtaaatctcaatggtagtgcatgttttttgcaatctccttctgacgctattttttgtcgccatctgtcattgcaatacgcccttgattcattgagaaatggaaaaggcaaagtcaacctgattaaacattactcctccgttgaatccatacagcagcatgtccccttagtccgggacgcggagttcagagcattacttcgccatcctcctgcagggagtcgcgttatcgcgagtaaggattttggcttcgctttagatattttcttttgtcgaatgatggcaaacaatgtcagtcatatgtccgcgattttatatatagacaatcatactttgtcagtaaggctacgaataaagcagtcagtgtatggacaattaaattatgttgtgtccgtttacgacccgaacgataccaacgttgccgtcagagacacccacaggacagcacggggctttctttcgcttgataagttcatcagttcaggtcccgatgctcagacctgggctgatagatatgttcgcaactgtgcaattgctattctgcccctattacctgtgggagttccaggggctattttcgcgggtattgcatcacgaatgccatttgcccctatacatccatcggcaatgttgttaataatggctacaggccagtctcaacagcttattacattattcaaacagttgcccatactccctgaaaaagaaatcattgaaataataactgcgcagaatagcgttggtacacctgctttatttttggctatgatgaacggacatactgacaacgtgaaaatatttatgcaagaaattcagtcactggtagataatcacatcattcatgaagataatctggttaaattactgcaaactaaaagtgctaacgaaacacctggactttatatctccatgttgtatggattcgatgaaataatcgatatctttctgaatgcattaaccactccaatagcacaagagcttttaaacaaaaaactggtgatgagtattttagccatgaaaatacatgatggtgagccaggattatacgccgcaatggaaaataatcaccctttgtgtgtcacacggttcctctctaaaattaatggcatcgcctttaaatacaagttgagcaaagctaacatcatggatttattaaaaggagctacagcacagggaacccctgcattatacatcgccatgagcaagggtaatgaagacgtcgtgttatcttatatatcgacgctgggtgcttttgcaaaaaaacattcttttagtcaacatcagttatttacactattggccgctaaaaatcatgacaacatgtcagctgttcatatagccattcatcataagcattataaaactgtagaaacatattatgctgctattaatgcaatcagccaaagcctgagttttagtgctgatgaaataaagacgtatttataaccagctatttacgatatatatcgatacataattttatttttttcataaaacgcagaaacagtgaccatgtgcacaacgccacccgacggctgtaataacaaaaaatcccttgatgcctgtcccttttgttacactccgttatcacgcacaagagatatgcaggacactggtatgccgactaaacgctttgataaaaaacactggaagatggtggtggtgctactggcaatctgtggcgctatgttgttgctacgttgggcagcaatgatttggggctgagcagtgacaaacgaagacagccagaccgcataacacggtccggcagataattttacatgctgtagcccagcgataaggttgtccgacggtcggtatgttccggtgcagactctggaggttcagagttccatgtgacgttgtaagccaccttcagtccaaaatgttcattaatagcaacatttaatgcgctttcggagttcagcgttgtgtcttccgcgccaaagaccgaaacaccctgcgtaaatttagcgttgtcagtcaactgccatgcataagccccggaggcatagcccagcggctgggtttcactggcattgtcggtatatttgtcgtaacgcacacctggaccgaattcaaagcggaaactgtgtaccgggccattcaaaaactgacgaccataacccgcggtcaacacatcgcgctctcgatagccgttataacggtctgtcagccagcttgcctgaccaaataaatagtcataatcagttaaattaaaacggctacgcccgcccgccgcatatttttctgaagaacgctcatcattagaagaagtattactggcgttcccccacagcgaccaggcagtggtgtgtccataccaggtcatggtggtgtcagccgtaagtgaggagcttttcgtattgcctgattgtgcaagatatcctgcgttcagattaccttcgaaaggttttttagcgctggcaggatcatccatgacagtaaaaacggaatcatcggcagctgcattcagtgacgcaaacatgccccccgccaacataacgatggcaggaactgtcttcaaaagcttcatttatcaagagtccgtacaacaaaaaaagagaccatcgcggtcccggaaactttcttaaggatcaaagattagcgtccctggaaaggtaacgaattataaaaaggcgcgaataacttagcaatgtattcttatttcattttttgaataagcatgtggcgaaaacagatttttatttatatatatttatctgcaaaattttaaataaagctccaataaatcatattgttaatttcttcactttccgctgattcggtgccagactgaaatcagcctataggaggaaatgatggtacgtatctatacgttgacacttgcgccctctctcgatagcgcaacaattaccccgcaaatttatcccgaaggaaaactgcgctgtaccgcaccggtgttcgaacccgggggcggcggcatcaacgtcgcccgcgccattgcccatcttggaggcagtgccacagcgatcttcccggcgggtggcgcgaccggcgaacacctggtttcactgttggcggatgaaaatgtccccgtcgctactgtagaagccaaagactggacccggcagaatttacacgtacatgtggaagcaagcggtgagcagtatcgttttgttatgccaggcgcggcattaaatgaagatgagtttcgccagcttgaagagcaagttctggaaattgaatccggggccatcctggtcataagcggaagcctgccgccaggtgtgaagctggaaaaattaacccaactgatttccgctgcgcaaaaacaagggatccgctgcatcgtcgacagttctggcgaagcgttaagtgcagcactggcaattggtaacatcgagttggttaagcctaaccaaaaagaactcagtgcgctggtgaatcgcgaactcacccagccggacgatgtccgcaaagccgcgcaggaaatcgttaatagcggcaaggccaaacgggttgtcgtttccctgggtccacaaggagcgctgggtgttgatagtgaaaactgtattcaggtggtgccaccaccggtgaaaagccagagtaccgttggcgctggtgacagcatggtcggcgcgatgacactgaaactggcagaaaatgcctctcttgaagagatggttcgttttggcgtagctgcggggagtgcagccacactcaatcagggaacacgtctgtgctcccatgacgatacgcaaaaaatttacgcttacctttcccgctaacaaaaacattcccccagcattgggggaatcatcaccaacctgtcggcaacgcgtttctccgactatgctcaaaagtcatgtgataacaaaggggtgaactatggccagtggcgatcttgtccgttatgtcataaccgtcatgttgcatgaggatacattgactgaaattaacgagttgaataattacctgactcgcgacggttttttgctcactatgacggatgatgagggaaatatccatgagctgggaactaacacttttggacttatcagtacccaaagtgaagaagaaattagagaactggtttcggggcttacccaaagtgcaaccggcaaagatcctgaaatcaccatcacgacctgggaggaatggaatagcaacagaaaataaatggtttttgggcaataatcagtctgtggtgtgcgttagctcgtgtttttacaccgcattcttgcgctaaccttatgatctggcagacaacatgggagagacatcatgtggcaggcaatcagtcgtcttttgagcgagcagttaggtgaaggcgaaatcgaactgcgtaatgaactgcctggcggagaagtccatgccgcatggcatttgcgctatgcaggacatgattttttcgtcaaatgtgatgaaagggaactgcttcccggttttaccgccgaagccgaccaactggagttactgtcgcgtagtaaaaccgtcaccgtgcctaaggtttgggcagttggcgctgaccgtgactacagttttctggtgatggattatctcccacctcgtccgctggatgcgcatagcgcatttattcttggtcagcaaattgcgcgtttacatcaatggagcgaccaaccacaatttggccttgatttcgataacgcgctctccacaactccacagcccaacacctggcaacgtcgctggtcaacgttttttgctgaacaacggattggctggcagttggaactggctgcagaaaaagggatcgctttcggcaatatcgacgccatcgtcgagcatattcagcagcgtctggcctcacatcaaccgcagccttctctgttgcacggcgatttatggtccggcaactgtgcactgggtccggatggcccgtacattttcgacccggcctgctactggggtgaccgagagtgcgacctggcgatgttaccgctgcatactgaacagccgccacaaatctatgacggctatcagtcagtatccccgctacctgccgatttccttgaacgtcaaccggtttaccaactctacacgctgttaaatcgtgcaaggttatttggcggtcagcatttggttattgctcagcagtcattggatagattattagcagcatgatatgggttgaggataatggccgctccgtgcggccttttgattaaataaacccaagcagagaaaagaacacataacctgcagcaatacaaataaccggcaggatatacagtgagaaaaactgcaggaaaatagtatggtgcggaacaacaatacgggactcaatttgttcacgcgttagcccctcttcccctttggctttttccagaatgagttgatcttcaacaccttcccgcaagaagcgcgcctggcgactcatccgggcaccggaatcctgcaacgccagtccgacaaaaatcaggatgaaaatcacccagaacataacgttcacgccaccattaaaattgggcgtcggggagttataccagaatagattcaaaaaaggcgtattcgcctgcatcatatcgatcatgacatgagtaaagtcgagcatgaccgcattaatgccttccttgttttcctgccgggtattcataaatttcagcaaagaaatcaatgtagagatcaatgcaggtataaaaatcacccaacccaaaatccttttcaaaacagcaatgcgtccagcttgttgatacgtcatgagttctccttgattaagacgcgtcgtttcacttagtttacctgtagatatctgttttcgcccattctttaaaggcgatatgataggcgcttaatcataagcacggcttaataccttacacataatgctctaaaggagaggttgtaatgtcaaccccgcgtcagattcttgctgcaatttttgatatggatggattacttatcgactcagaacctttatgggatcgagccgaactggatgtgatggcaagcctgggggtggatatctcccgtcgtaacgagctgccggacaccttaggtttacgcatcgatatggtggtcgatctttggtacgcccggcaaccgtggaatgggccaagccgtcaggaagtagtagaacgggttattgcccgtgccatttcactggttgaagagacacgtccattattaccaggcgtgcgcgaagccgttgcgttatgcaaagaacaaggtttattggtgggactggcctccgcgtcaccactacatatgctggaaaaagtgttgaccatgtttgacttacgcgacagtttcgatgccctcgcctcggccgaaaaactgccttacagcaagccgcatccgcaagtatatctcgactgcgcagcaaaactgggcgttgaccctctgacctgcgtagcgctggaagattcggtaaatggcatgatcgcctctaaagcagcccgcatgcgttccatcgtcgttcctgcgccagaagcgcaaaatgatccacgttttgtattagcagacgtcaaactttcatcgctgacagaactcaccgcaaaagaccttctcggttaatgaccaggggcagtgatctcgctgcccctggttctttatctgaaattgcattcaactgacggattaatcgtcaatttaagagaaagagttacaccgtcaccacttccgtgcactgtataaaaatcctatactgtacgtatcgacagtttagtgagttttatcatgacggcggaaggtcaccttctcttttctattgcttgtgcggtatttgccaaaaatgccgagctgacgcccgtgctggcacagggtgactggtggcatattgtcccttccgcaatcctgacgtgtttgttaccggacatcgatcacccaaagtcgtttcttgggcagcgattaaaatggatatcaaaaccgatcgcccgcgcttttgggcatcgtggttttacccacagtctgctggcggtatttgcgctgctggcaaccttttaccttaaggttccggaaggctggttcattccggctgatgcgctacaaggaatggtgctgggttatttgagccacatacttgccgatatgctgacacccgccggtgttcccctgctctggccatgccgctggcgtttccgcttgcctatcctggttccccaaaagggcaaccaactggaacgttttatctgcatggcattatttgtctggtcggtatggatgccccattcattacccgagaacagcgctgttcgttggtcatcgcaaatgatcaataccttgcagatccagtttcatcggcttattaagcatcaggttgaatactaaaaaggcaaaaatcacctttctggaataagcaattccatttgaatataagagccagctcacagttctgttaatcttgcgccaacactatgactgctacgcagtgatagaaataataagatcaggagaacggggatgaactttccattaattgcgaacatcgtggtgttcgttgtactgctgtttgcgctggctcagacccgccataaacagtggagtctggcgaaaaaagtgctggtgggtctggtgatgggtgtggtttttggccttgccctgcataccatttatggttctgacagccaggtacttaaagattctgtacagtggtttaacatcgttggtaacggctatgttcaactgctgcaaatgatcgttatgccgttagtcttcgcctctattctgagcgcggttgcccgtctgcataacgcatctcagttaggcaaaatcagttttctgaccatcggtacgcttttgtttaccacgctgattgcggcgctggtcggtgtgctggtcaccaacctgtttggtttgacggctgaaggtctggttcagggtggtgcagaaactgcacgtctgaacgccattgaaagtaactatgttggtaaagtctctgatctgagcgttccgcagctggtcttgtcctttatcccgaaaaacccgtttgccgatcttaccggagccaatccgacgtcaattatcagcgtggtaatttttgccgcattcctcggcgtagctgcattgaaactgctgaaggatgatgcgccgaaaggtgaacgcgtcttagccgctatcgataccctacaaagctgggtgatgaaactggttcgcctggtcatgcagttgaccccttacggcgttctggctctaatgaccaaagtggttgcaggttctaacttgcaagacatcatcaaactgggaagtttcgttgtcgcgtcctacctcggtctgctgattatgtttgcagtgcatggcattctgctgggcattaatggcgtgagtccgctgaagtacttccgtaaggtatggcctgtgctgacgtttgcctttaccagccgttccagtgctgcgtctatcccactgaatgtggaagcacaaacgcgtcgtctgggcgttcctgaatccatcgccagtttcgccgcctctttcggtgcaaccattggtcagaacggctgcgccggtttgtatccggcaatgctggcggtgatggttgcgcctacggttggcattaacccgctggacccgatgtggattgcgacgctggtcggtattgttaccgttagttccgcaggcgttgccggtgtcggtggtggtgcaactttcgccgcactgattgtactgcctgcgatgggcctgccagtaaccctggtggcgctgttaatctccgttgaaccgcttatcgacatgggccgtacggcgttaaacgttagtggctcgatgacagctggcacgctgaccagccagtggctgaagcaaaccgataaagccattctggatagcgaagacgacgccgaactggcacaccattaattcttatgctggcaacggtccgttttgtataggggccgttgccttactttttaaatgttccatcgcggcgatgcatactgactcatatttaaacagatcgtcagcgaaaaaaatgtccaacttatcaatacattcctggctcaatgaatgtgcctgtagcgagaagcttaaaacctcatacccgagacgttttctaagtgaactatctggaatactcataatatcttcaagcacaccacttcccattcccggaagatttagtggattaaaaagaagattgatattaagcattgatattatcgaaggaaactttaggagactctcatttttttgaatcgcagcaaaaatgctcccgacaggatgtatataattttgttcatagtatatagtccttaaatagtgaataaccaacctgttttttatactgatcaaattggtcattttttctgggcgaaatacagaagtgacatccattccaataaaatctttatttatacctcttatccgaatttcactaccataaagattattaattattactctatatttaacattgtcctgcagatatgtatcaaaactaagtgctggcgctcctggctttgaggcatcatagttaatgttagacatataggcaatcatataattaaagtttgattctgctatttcatcgcagtcacattgacccgttgatataaagaaagtgagtgctgtcatagtagactgcagcctttctttaaaagagtcgaaagccaggcttttaatatttaaatcaccataattactctgtattaagtttgtagaaaacatctcccgcctcatattgttaacaaaattattatctcatttaaatctaagtcatttacaatataagtttaagagcgacgccacaggatgaactatcaaaaatagctcatcatgattagcaaaacttaaccattttaaaataaataaacaattaaagaaaaaagatcacttatttatagcaatagatcgtcaaaggcagctttttgttacaggtggtttgaatgaatgtagcaacgaaatacagaatttcaggtcatgtaactcccggcaaaaccgggaggtatgtaatccttactcagtcacttccccttcctggcggatctgatttgcccaacgttgggcagattcaggcacagtaaacgccggtgagcgcagaaatgactctcccatcagtacaaacgcaacatatttgccacgcagcatccagacatcacgaaacgaatccatctttatcgcatgttctggcggcgcgggttccgtgcgtgggacatagctaataatctggcggttttgctggcggagcggtttcttcattactggcttcactaaacgcatattaaaaatcagaaaaactgtagtttagccgatttagcccctgtacgtcccgctttgcgtgtatttcataacaccgtttccagaatagtctccgaagcgggatctggctggtggtctatagttagagagttttttgaccaaaacagcggccctttcagtaataaattaaggagacgagttcaatgtcgcaacataacgaaaagaacccacatcagcaccagtcaccactacacgattccagcgaagcgaaaccggggatggactcactggcacctgaggacggctctcatcgtccagcggctgaaccaacaccgccaggtgcacaacctaccgccccagggagcctgaaagcccctgatacgcgtaacgaaaaacttaattctctggaagacgtacgcaaaggcagtgaaaattatgcgctgaccactaatcagggcgtgcgcatcgccgacgatcaaaactcactgcgtgccggtagccgtggtccaacgctgctggaagattttattctgcgcgagaaaatcacccactttgaccatgagcgcattccggaacgtattgttcatgcacgcggatcagccgctcacggttatttccagccatataaaagcttaagcgatattaccaaagcggatttcctctcagatccgaacaaaatcaccccagtatttgtacgtttctctaccgttcagggtggtgctggctctgctgataccgtgcgtgatatccgtggctttgccaccaagttctataccgaagagggtatttttgacctcgttggcaataacacgccaatcttctttatccaggatgcgcataaattccccgattttgttcatgcggtaaaaccagaaccgcactgggcaattccacaagggcaaagtgcccacgatactttctgggattatgtttctctgcaacctgaaactctgcacaacgtgatgtgggcgatgtcggatcgcggcatcccccgcagttaccgcaccatggaaggcttcggtattcacaccttccgcctgattaatgccgaagggaaggcaacgtttgtacgtttccactggaaaccactggcaggtaaagcctcactcgtttgggatgaagcacaaaaactcaccggacgtgacccggacttccaccgccgcgagttgtgggaagccattgaagcaggcgattttccggaatacgaactgggcttccagttgattcctgaagaagatgaattcaagttcgacttcgatcttctcgatccaaccaaacttatcccggaagaactggtgcccgttcagcgtgtcggcaaaatggtgctcaatcgcaacccggataacttctttgctgaaaacgaacaggcggctttccatcctgggcatatcgtgccgggactggacttcaccaacgatccgctgttgcagggacgtttgttctcctataccgatacacaaatcagtcgtcttggtgggccgaatttccatgagattccgattaaccgtccgacctgcccttaccataatttccagcgtgacggcatgcatcgcatggggatcgacactaacccggcgaattacgaaccgaactcgattaacgataactggccgcgcgaaacaccgccggggccgaaacgcggcggttttgaatcataccaggagcgcgtggaaggcaataaagttcgcgagcgcagcccatcgtttggcgaatattattcccatccgcgtctgttctggctaagtcagacgccatttgagcagcgccatattgtcgatggtttcagttttgagttaagcaaagtcgttcgtccgtatattcgtgagcgcgttgttgaccagctggcgcatattgatctcactctggcccaggcggtggcgaaaaatctcggtatcgaactgactgacgaccagctgaatatcaccccacctccggacgtcaacggtctgaaaaaggatccatccttaagtttgtacgccattcctgacggtgatgtgaaaggtcgcgtggtagcgattttacttaatgatgaagtgagatcggcagaccttctggccattctcaaggcgctgaaggccaaaggcgttcatgccaaactgctctactcccgaatgggtgaagtgactgcggatgacggtacggtgttgcctatagccgctacctttgccggtgcaccttcgctgacggtcgatgcggtcattgtcccttgcggcaatatcgcggatatcgctgacaacggcgatgccaactactacctgatggaagcctacaaacaccttaaaccgattgcgctggcgggtgacgcgcgcaagtttaaagcaacaatcaagatcgctgaccagggtgaagaagggattgtggaagctgacagcgctgacggtagttttatggatgaactgctaacgctgatggcagcacaccgcgtgtggtcacgcattcctaagattgacaaaattcctgcctgatgggaggcggcgcaattgcgccgcctcaaatgatttacatagtgcgctttgtttatgccggatgcggcgtgaacgccttatccggcctacaaaactgtgcaaattcaatatattgcaggaaacacgtaggcctgataagcgaagcgcatcaggcagttttgcgtttgtcagcagtctcaagcggcgcagttacgccgcctttgtaggaattaatcgccggatgcaaggttcacgccgcatctggcaaacatcctcacttacacatcccgataactccccaaccgataaccacgctgagcgatagcacctttcaacgacgctgatgtcaacacatccagctccgttaagcgtgggaaacagtaagcactctgacggatagtattatcgataaacgccggatgacacatcacctccagcgaacgatcaccccgatggcctgcgtcatccagcacttgcaggaacagcgactcactgatctcttcaccgtagaatgcactgctgaatccctgggtagtgcgcaggttgaccggcaaatcaaacgccatctgacgatccgcccgcaacgcaatgccctgctctgccgcaaacctggcaacaatcgggaaaatctgcgggaacatatgcacatgatgatggctatcaagatgcgtaggtttgcgtccaaatagctcaatgaaacgcaaatactgactgacaagctcctgagtaatttcttccagcggtaaagcatcttcttctgccaactgccagatccattttcccagcacaccatcgcgggttaaccccggcatagctgtcagtggcttacccatagtaaggacaaagtgcatccctatggccagactcggttcatcacgactcaactgcaccgcatggtcaatagcctgcccattcaccagcgccgtcgtcgacgtgacaatcccattgcgacaggcctcgataatgccgtagttctgacctttgcttaagccaaaatcatcggcattaacaatcagtaagcgttccataatcagcctcggttaatgtgcttttttaagctctgcgatgcagtcggcaaagtttggcagccatttctcgtgcgccagaatcatctcgcgtgccagcagctcagcatcgcgatcggaatgcaccaacggactaaggtttagcgccagtaacacatcgttaaattctccgctaagtgcggcgttactggcagcaatctcgaagcctttaatggtgtgaatcagccccattactttatcatcgaaatgcgtaatgcgcggatgtggcgtcgcgccatcgcgccccagcttacaggtcatttctactgcccagtctgccggaatattatcaatctgcccatgatgcgggatattaacgtaatgttctgcttgcttgtcgttgtagatagcgttgatcacttcgcatgctgcatcagagtaataagccccaccgcgctgttccagttctttcggcttaactttcagctcaggatttttatacagctcaaaaagttgtttctcgactttctgtactacctgcgctcgtgcgccgcctttgtagtattcgcccatttcaatagccagcatctctttctgcttgaagtaatacagcagataagaacatggcagcagattcaacgaacgaattaagccctcactaaatggcagatcgaaaatattttttacagaggacgcttttaactgccctgacgccacaccatcaagcaattcggcaaagcgcgacttgccatttatcagcacatccttaatgaacaccatatggttgaggccgaacaaatcgatagataaatcatcgctgtctttcagcatcagaacatcgcgaataaacatcttcatgccgatcggaatattacacacgccgataaagcgtttaaatccggtatgacgataaacggcttcagtgaccattcccgccgggttagtgaagttaatcacccatgcattcggacaaagttcttcgacatcttttacgatgtcaaaaatcaccggaatggtacgcagacctttaaacaaaccgcccgcgccgttggtttcctgaccaagataaccatgacttaatggaatacgttcatccagttcacgcgccggtaattggccaacgcgcagttgggtagtaacgaaatcagcatctttcaatgcttcgcggcgatccagcgttttataaagcttcatcgggacgccagcgttatcaatcatccgttggcagagatcgaaaataatatccagtttcggtttaccaccttcgacatccaccagccataattcgctgaccggcaattcgtgataacgcttaataaatccttccagtaactccggggtatagctgctcccgccaccaatagtgacgacttttaatttctggctcataatttctcccttcagtacagaatactgatatctggcatatctgcccccccggacataaataatccagcaacaggacagatatgtgaattgtcaggtataacgacttactgattaaattcagtcaatttcttacgatagctcttaggcgtaaaggacgttaatttcttaaacgttttaataaacaaactcgggctactataaccggcctcaaacgcaatatccgtcactgaatagttggtcatttccagttgttttttggcaaaattaatacggatttcattaataatctgcattggcgttttgccataatatcgttgagtcgctcgcgtcaaatattcctgtgatttggctgacaacgccaccatattctccagcgccgattcactaaactgctctttatcatgcatcttttctaccgtacttttcagccactgcggtacatcatcaatcacctgttcttcgcggtaatgacgtaaacggttaatgacataaaaagtaaccatctcaacaaactcttccagccctgtttcgcggaaattcaatgaagaaatcactgtttccacataggtgagaaaagcgttattggtccggtatacctgcgaagcgacaaagcaataaggcaacaatggcaggtaatgctgctcaaaaaagcgtttactgatcccaacgttcaatatgcgcgtggcaccaaactcataaaaactttgatggtgcgaacctaacggaataaaaacaaaatcgccccgttccagtaacacgcgcttaccgttaatctcctggaaataacgcccggttaataccagagtaaattcataatagtcgtgctgatgcagtccgctgatactctcagttttgttatagataaacacatggaagtttttgccattaaacaactgctgttctcgggcagtggcaatttccggcgcgttaatcactggctgcatcatcgactccttatgccttcagtttttcatgaagctcaattaattcagtaatcagttcacgcgcaagcatggacgtcattaaatgatcctgagcgtggaccagcaccagactcactttcatcttaccttcgcccgcatcgccttcaatcagtttcgtctgtaccagatgcgcttcattcaatgccatccgtgactgatccatcatggcttttgctgcggcaaaatcgccctgcttcgcctgtttcagtgccgcatacgccaggctgcgcgcttgtccggagttgatgatcagccccatcaccacttcttccagctcttcagcttccgtttgcgtatcgggaatgttatcgagatccatcatacatcgttcctctcttttcttaccggcacgattacccgtaccggcatcgattaaaatttcagggcgttagcgatatcttcttcgctctcttctttatcaatcgcattttgtgctttgttagccaccacaacaaagggcagataaattaacgttgcgatgccaaggttgaagagtgcgaccagcaatgcggcgacgctaccgttggtgttaaagaaggctcccagaccggttggcatggtccacggtgcaatattggtcaccggaggaataatgcccatgtagtacgctgcgagggtgattgccgccagaatcggttgtaccagtacaaacgggataaacatcaccgggttcatgataattggcagaccaaacagaatcggttcgttaatctggaagatgccggacggcagcgccagttttgccacctgacgataatcagcacggcgagaggcgataaagatagccaggatcaggcctaaagtcgcaccactgcccccaaggaaaataaaggagtccagcatcggcttggcccagatatggaaggtcttaccggctgccagcgccgcttcgacggaaccatattgctgataggtcgcgatattttccagtgcccacggcgtcataatgccgttgtccagtgcggtcagcgccagcgcgccatgaataccgaagaaccagagcagtggaacaaagatcacataggcccagcccaccacgctacccaacgatgccagtggggttgagatggtatccataatgatctgatggaagttggtgccccaggtattcaacgcccaggcaataatccccatcacggaaagaataataaagccgggaattaatgccgagaaggaacgcgatactgaagcaggtacgctgtcgggcagtttaatgacccaattgcggcggacaataaaggtaaacatttctgccaccaccaggccaataataatcccggagatgatattcgccccacctaaccagtttgcaccaaccgcataggcctcaccgacactatatggggtgacggtcataaatgctgcaacggataacaacccagccgccagcgcatcgactttacgctcttctgccagcgccatgccaataaagaacggtgccattaaagacattattcctaatgttccgttatatacgttgccgccaatacctttcagaccattaagtgtttcaatggttgaggcgtcgaggcgaatacctaaggaataaaaaaacgacccctccccaaagcttagaaaaacgttgttaattaatacaaacatggcccccgcaagggttaacggcattaagcgaataaagccatttttgattgcattaacgtgtggctgctttcctattttaactgcaaaagggaggagtaccttttcaagcgatgcaataacattactcatagaaaaatacccttaaaaaccgcaatttaaatattgcggtattgatttatgaaataactctttgacgggaaaatttaaaataaattaatttgctgcggcttttttaatcgctgcaaccgcagccttaagcacgcctaaaccatcgactttgccataaagcagcgagtcaattacttcaaccggtttgttgggtaacaaacgctggatttcgggcaacatataagcaatctgcggccctaataacacgacatcggcattctgacctttttcaccagccagtgtttccggaaatgcttcaataatgaccggaacttcatatttttctgcctgtgcgcgcatttttgataccagtaaagaggtagacatgcccgcagaacaaaacagataaatgtgtttcttttccataaaactgccctcatcgacgattatctgtcagccagacactccgcaagccttaacctgcttccatgctctgggtaacttgcgaaaccaacatgactttttttgtggctgaaaggagtatacggtatagacctgagcaatagtatttctttgaccttataaattgtttctccttgacctgtggttatgaccctcttcacatttcgggcaaataattcgcgaagataattaagaactcaggccaaaaaaaaccggcgcaatggccggtttccgttgttactcaagctttcagacgaattgattacttcgcagcctgtggatcagtgtcgtattcagcacaggtctgataaccggagttgatgacatgtccggtatcatctaacgcgacaaagtaggtttctgctttaccatcacgttgacccaggatgtaggtctggcaagtaccgcgagcatggatcatgctcacttcagacgaaggtttacccgcaatttgtgcaacctgcgcccggctcatgccttttttgacgtctttcaccacaggctgtacaaactggtctttggtacgatcataagccgtacaacccgccagcatggttaataccgccgctgcactcagaattcctgccatattcttgttcatattccgtcctcttgtttatcagcgtgttagataagcctggaatacattgggcgctttttcaagcccgtgaacgaaacggctccgctttcagaggattcctgtatgacgttttaaccaccattcagcccgctgtcgcttgtcgtttcagtagcaacgggttagctttaaggaagttttgtcttttctgtctggaggggttcaatgacattgcaacaacaaataataaaggcgctgggcgcaaaaccgcagattaatgctgaagaggaaattcgtcgtagtgtcgattttctgaaaagctacctgcaaacttatccgttcattaaatcactggtgctcgggatcagcggcggtcaggactccacgcttgccggaaagctgtgccagatggcgattaatgagctgcgcctggaaaccggcaacgaatcactgcaatttattgccgtacgcctgccctatggtgttcaggccgacgaacaagattgccaggatgccattgcctttattcaaccggatcgcgtattaaccgttaatatcaagggcgcggtattggccagcgaacaggcattgcgggaagcaggcattgaactgagcgattttgtccgtggcaatgaaaaagcgcgtgagcggatgaaagcacaatatagcattgcgggtatgaccagcggtgtcgtggtgggcaccgatcatgcagcagaagccattaccggattcttcactaaatatggtgacggcggtacggacattaatccgctgtatcgtctcaacaaacgtcagggtaaacagttactggcggcattagcttgcccggaacacctttataagaaagcgccaacggccgatctggaagatgatcgcccttctctgccagatgaagtggcactcggcgtgacctatgacaatatcgacgactatctggaagggaaaaacgtacctcaacaggtcgccagaacaatagagaactggtatctgaaaaccgaacataaacgccgtccgccaattaccgttttcgatgatttctggaaaaagtaataatttgcacatattggattgtgcgaaaaagagtaatttgttcacgccggatgcggcgtgaacgccttattcgacctataaaactatgcaaattcaatacattgcaggagtcgaataggcctgacaggcgtagcacgtcagacggtgtaacctttgtcatcgacccgcctcttttttaatcgcttcccgcctgttacactggatagataaccagcattcggagtcaacagtggtacggcgtttaacttctccgcggctcgaatttgaagctgcggcaatttatgaatatcccgaacatttacgttcattccttaatgacttacccacccgaccaggggtgtatctgtttcatggtgaaagtgacaccatgccgctctatatcggcaaaagcgttaacatccgcagccgcgtcctttctcatttacgtaccccggatgaagccgccatgctacggcaatcccgacggatcagctggatatgtaccgccggtgaaatcggcgctctgctccttgaagcgcgattaatcaaagaacaacagccgctgtttaataaacggttgcgccgcaatcgccagctctgtgccctgcaattaaatgaaaagcgcgtcgatgtggtgtatgccaaagaggtggatttttcacgagcccccaacctgtttggcctgtttgccaataggcgcgcagctttgcaagcattgcagaccatcgctgatgaacaaaaactttgttatggcctgctgggactggaaccgttaagtcgcggtcgtgcatgttttcgttcagcgctaaaacgttgcgccggagcatgctgcggtaaagagagccatgaggaacatgcgctacgcttgcgccagtctctggagcgtttgcgggtggtgtgttggccttggcaaggggcggtggcgctgaaagaacagcacccggaaatgactcaatatcatattattcaaaactggctgtggctgggggcggttaattcgctggaagaagcgacaacgttaattcggacacccgccgggtttgatcacgacggttataaaattctttgtaagccgctgctttccggtaactatgaaattactgaacttgatccggcgaatgaccagcgagccagttgatttcactgaacaacagtttaccttgcggttgtaaaagccgcagggtgtgcctgccatcgaaccagcacgcgccctggtcggtagtgagcaatttatcgcccagttgccacgccccgttaatcacaaacaccaccccgccgcgtgagccaaaggtagtaaacgtacgttcggcaattctgactttcgccttacagacatccaggcgtgtcatgatgttgaaatccatcgacatctgccctgccgtcagtttcgcttttaccacctggtccgctgcaaaggcaaaaggctggaacggttttaaggtatggttaaagcggtctgcgctttcaaggagcatctcgccgccttccagcaacgtcactatcctttccatgccgggaaacaaagaaaactccccattcgccgcgatggatgcaatgctggcacgccagtaaaaatcacgttttgccggtgggaacgtgcaaatttcgcgcgtttcaccggcagcatttcgccacagattcaccgacattttacgcatatcaaagtattccatactcgctcccggcccgttcttttcattgttatcgttcaggtaaccgtggatggttatcggcaactcgggtgatttacgttagtggtgatcaggctttttttacaactgtttgagaagagaaaagaaaaccgccgatcctgtccaccgcattactgcaaggtagtggacaagaccggcggtcttaagttttttggctgaaagattattcagcagttgcaggcattttaccttttgccgctggacgttctgtcagacgcttctcaaaattagcattaaattgctttttctgttccggcgtcaggatgttgtaaattttgttctgggtttccatgtgcgccagcatgttagctttgcgctgttcttccatttttgcgatctgcgcttcagcttttactttatcgaaggtatcgctggcaatgatgtcatgcattgcgcggcgttcttccagcggcggacgtttcatctggtcacgctggcctttcatgatttcgcggatctgctgtttctgcgcgtcggtcaggttcaggtctttgaacatcatgtcctgatgcggaccgaacttgcctttgtggtgcatcatcggcttcgcgtcagccggtgctgcggtagtggtgtctgcggcatgggccaggttagccgcgccaagagccagggtagaggcaacaaacagtgcagttaatttacgcatattctatatccttcctttcagttatttattacggctttcttaagtagcgtgccgtgttgacgagattaactttactgactttagcgtcaattaatcagagcaacggtaaaacaatgaaagtgtaaaaaacacttttgcgccaattatggagaaaaaaagaaaatttgatggagagtgatgagagaatattacaacacgatgattttgcagagattatgaagaactataccggatgactggtgataaataaagcaaataaccaggattaatctgtattaatttataagaaagcaacttaatacccgcagaatgatttctgcgggtaagtattagcttattttttcgagcattaatcccgcgcgtaatcccaacgctaccaacggattagggaataacacatactctacatcatgggttacggtaaaacgttcctctccgtcctgcgccagcaatgttcctttctcaaacggcataaaattcagcgtgtcacttgccatatgcatttcgaaggacggcgagtggcgagtaatttgcgaaaccacccgataacggagcggcggtgttctcacgataccgacactctcaccagatagcagcgcagcaattgcgctggcagttactgcaaactggcgaagatcgttttgcccaaagggcaacgctttgccaagttccagcgtacaggccagcgcgccaaaatgtctggcgctgaaatgggtaaacgtaccaccaggttcctgatggaacaccagcgcctccagccccgccgcacccagccacgtcagaaatttctcgtcccagggaatgtcgcgttgcggtaatacaccgaactgcggatgcaaggagccacgaattgcggtatgtagatcaaggtgccagcgcacagattctttgccctggtcataaaaatcttccaggcactgttccagttcgcgcgcccgacaggtttctccgctttcagcaaatagctgccaacgaccgccaaacattcgattcatatcgctatggcaataacgtttcccttgcttcagcgcaggaggattcccgaggatcaccagcaaccgccaacgtaacgggatctcgccgtgagatatcgcgccaagcaacgcgtccagcatctccacaggtgccgtctcattaccgtgtattcccgctgaaatcaccagtgcgccttgcggtggcgttaatggcgtcagttccagcacaccatcgcccagccagcgccagcgaacgccgttgatttctcgctcggtgataaccggttttttacccgttaaggtcagagcaagaaaattatccattgccccctccctcgcgctggaacggataaaccgaaccgagattcagtaattggctcaatacatccagtgcttcccgcccttcgcgcagcaattgcgggtcggccagatcggcagcagtaaggcgatcgcggtagtaacgatccacccagtcattgagcgcattaaacagcgtatcgttcatcatcaccgccggattcaccgcccggcgttcttcttctgtcaataccacccgcaaccgcaggcacgccgggccgccgccattcgccatgctttcacgtaaatcaaagacttttagttcgctaatcgggttgtcagcggcaaggagttcattgagataaccccatactccggcgtgttcccgacactcctgaggcagcaccaacatcatggaaccatcatcgcggctcagcagttggctgttaaacagataggtagacaccgtatcagacacggaaacctgagttgccggaacttctatcgccataaaaccattgacccgcgcacgcaggtttgccagtaactgtgactggcgagcgaacgcctgttggtggcaaaacagcacctggcggttactcacggcaatcacgtcattatgaaaaacgccctggtcgataacgtccgggttttgctgggcgaaaatcacctgttggggattcacctgattcagccttgccaccgcctcgctggcttcgcgagtctgtcgcgccggataacgggaaggccgggtatcattgccttcttctcgcccgtagacaaaaagttgcatacccggttcaccgtaatgaccgccgagacgattgtggtttgccgccccctcatcaccgagcaacgctacctgtggcaacgccgaatggacgctaaatttctcttcgtcgttaaaaatcgcttttaacagcgattcagtgacgggcgcttccagcgaacggtgaaatttattgttcaggttggcaacggtgagatgcactttgccatccagcgtatcggcagatggcgcgatcgttgccgcattggctacccacattggcgaagcggaactgacgctggaaagccagtgcggtgcctggcgtgcaactttttccagtacctgctcatcgctaccactgaatcccaactgacgcagcaccggaataaacggacgctcgtgcggcgggatcacggcctgggggaatcccgcatcggcaagggctttcattttcagtaagccctgcttcgccgccagtcgcgggttagacacctgaaaacggtgacgggtagaggcttcattaccaaacgacaggcccgcgtaatgatgcgtcagccctaccagcccgtcgaaattgacttcccaggcgttcatcgcaccacctcatcggaaaaatccagcccggggttaagcgtggcgggcaatgttaacgagtccgactccaggctcgccatcggccatgcgcagtaatctgcggcataccaggcgctggggcgatggttaccggaagcaccaatgccgccgaatggcgcggtactggcagcaccggtaagcggtttgttccagttaacaatccccgcccgcgcctccagcaacagttgatcgaacttttcccgctcgggggaaaccagaccgcaagagagtccgaagcgagtgttattcgccattcgaatcgcttcatcgaaagtatcataacgccagacgcgcaataacggtccgaacacctcttcatctggtacgccagcaacgcctgtcatttcaatgatccccggcgtcagcaacgatgtccctgcttgtaataagcgcggcgcaagcaggggtcgtccgcccatcgcttccagttgctgccatgcagtaaccacctgctgtgcggcctgttcagaaatcagcccgccaataaacggctgcggttcgtcatcccagttgcccggcgttaatcgctggctgacggcaaccagacgagcaagaaacgcatcgccctgcgccccgcttttcagcaataaacggcgggcgcaggtgcagcgttgaccggctgtgacaaacgccgactgaatggtcagatggacagccgcgtcgatatccgccacctcatcgataattagcggattattaccgcccatctcaagggcgagaattttctccggctgaccggagagctggcgatgcaactggtagcctgtattggcgctaccggtaaacagcaaaccgtcgagatcctccagcgcactcagcgcctgacccgtttcacgcccgccctgcaccaggttcagcacgcctggcggcaagccagcctgctgccataaacgcattaccgcttcgccactccacggtgtcagttcgctgggtttaaagataatggtgttacctgccagcaatgccggaacgatatgtccgttcggcaaatgaccagggaaattatacggcccaaacaccgccagcacgccgtgcgggcgatgtcgcaggctcgccgcgccgtccggcatttcactacgctgctcgccggtacgaacgtgatacgccttaattgatatcgcgattttattgatcatcgccgtcacttcggttgccgcttcccagcgcggcttacccgtttctctggcaataatcgcggttaattcggctttattgctttccagcagtgcggcaaagcgttcgacaacggcatgacgttcagcaaatgaaagccgcgcccagcgcggaaacgccgcacgggctgcccgacaagcctgctcgacctgagcggcatcggcatcattgccttgccataacacctcgcccgataccggattacgcttcacacgcgatgcgccctggcccgttatccagtcaccgttaatccataaagtcatgctgttttctcctctgcgcacaggcgcaccagacgaacgcgatccccggcgtggcatttgagggcatccagttgtgcggcggttaaaatcaaacgctcggttgccggatcggtacgcaccagcaccacgcggaaatggtgataattttcattggcgaccaggcaggctgggaaatcgccctgcgcaggctgcccttctgccacttccaccagccgacttttacggatggcgcgcacgcggtcgatgtcacactcaagcgtcggcccaccgtcaaagatgtcgatatagttacggtagcgaaaaccttctttctccagcaccgcgcgggcaggcgcggtttgcggatgtacctgaccgatgacgtcctgggcttcctgggataaaaagtgggtatagatcggatgtttcggcatcagttctgcaataaatgccttttgcccggtgccgcagagaaaatcggcgcggctaaaatccatcgaaaagaagcgtttaccgaggctttgccagaacggtgaatagccgtgttcgtcaatcaccccgcgcatttcagcaaccactttgtcattaaacttgtcgcgaaaagccgccataaacataaagcgcgatttcgacagcaaatagccgttgccctctttgcgccagtccgggtcgagaaacagcgtgcacagctcgctgctgccggtgtgatcgttactgagaaacagcgtcggcaatgcgttatagacattcagctcttttgaggcgtgaaccaacgtgccgacgcgatagttgtaccagggatcgttcagcccaaccgccacctcaatggcacaaatccccgccacggtgcctgtctcgctatcttccagcacgaacacatagccctgctcacttttgggcagttcgccttgccaggttttgattgccctttcgatacgcgccgaaagcgtggcttcattggcgggaagcgacgtcaggccgccgcccgttttgctggcaagctgcatcagcgccgagacatctgatcgctcaacgggacggatgaccatcatgatgaacctcggctaacaaagtgttcgcaagcagctgcaaagcgatccagtccggtcgtcacctcttcttcgctgacattgagcgcaggcgcaaaacgcaccacgttgccacccgcaatcagtaccatcacgcctgctttcgccgcttcctgagagatctgtttcgcttgcccggcgtaatcggcattcagtacacagccaatcagcaaacctaagccgcgaacttcactgaacaaaccatagcggtgattaatagtattaagacgctcaacaaaccagtcgtgacgctgtttaacgccattaagcatctctggtgtgttgatgagctccagcactttgcctgccaccgccgaggccagcggattaccgccataggtggtgccatgagtgccaacggtcatcacgcgggcgcactcttcggttgccaacaacgcaccgaccgggaaaccgccgcccagcgctttggcggtagttaacagatcaggcgtcacgccgtagtgcatataggcatacagttccccggtgcgcccgacgccggtttgtacttcatcaaaaatcaacagcgcattgtggcggttacacaattcacgcagaccttgtaaaaacgcgttgctggctggcaccacaccgccttccccctggatgggttcgacaatcaccgcacaggtagagtcgtcaatcagcgcgctggcagagttaatatcgttatatgcagcatgacgaatatccgccggcagtggcgcaaaatcctgtgaataggctggctgcccacccgcactgacagtaaacagcgtgcgaccatgaaacgcatttttgaacgccacgatgccgctcttatggctgccgtagcggtcgtgagcgaatttacgcgccagttttagcgccgcttcgttggcttccgcaccggagttacaaaagaagacgcgatcggcaaacgtggcgtcgatcaattttttcgccagtcgcagtaccggctcgttggtgtaaccgttgccggtatgccagaacttactcgcctgttcgttcagcgcttcacgcagttccggatgcgcatggcccagcgcgttcaccgcaatgccacccgcgaagtcgatatactctttcccctgctgatcccacaagcgcgaaccttcgccacgtaccggtataaagggtgccggagcgtaaacaggtatcatccattcatcaaagttttcacgcgtaattggctgagacatagcgacctctacagtaaataattcgttatttatatgttaataataagtaatgtttgcgctgtaaatgtagattgcagggttcgtgccagccagtgataaaagtgcataaacggcggaggctaactggaaatcaaggagttataaccaaaccatatgcatttaaagtgcatataaagtgaatacgtttgcgatgtgggtgaataaaaagaataaaaaacgcaatgttatgcagaagtaaaatataattctggaattgtgatcattgacgaaatttactggaaattactgcgccattctgacgcagcgcgcaccaaaagcgggcattttttgcgccatcgttgacatcattaacaaccatcgatcaaatcacttaacaacaggcggtaagcaacgcgaaattctgctaccatccacgcactctttatctgaataaatggcagcgactatgaaatttgtctcttttaatatcaacggcctgcgcgccagacctcaccagcttgaagccatcgtcgaaaagcaccaaccggatgtgattggcctgcaggagacaaaagttcatgacgatatgtttccgctcgaagaggtggcgaagctcggctacaacgtgttttatcacgggcagaaaggccattatggcgtggcgctgctgaccaaagagacgccgattgccgtgcgtcgcggctttcccggtgacgacgaagaggcgcagcggcggattattatggcggaaatcccctcactgctgggtaatgtcaccgtgatcaacggttacttcccgcagggtgaaagccgcgaccatccgataaaattcccggcaaaagcgcagttttatcagaatctgcaaaactacctggaaaccgaactcaaacgtgataatccggtactgattatgggcgatatgaatatcagccctacagatctggatatcggcattggcgaagaaaaccgtaagcgctggctgcgtaccggtaaatgctctttcctgccggaagagcgcgaatggatggacaggctgatgagctgggggttggtcgataccttccgccatgcgaatccgcaaacagcagatcgtttctcatggtttgattaccgctcaaaaggttttgacgataaccgtggtctgcgcatcgacctgctgctcgccagccaaccgctggcagaatgttgcgtagaaaccggcatcgactatgaaatccgcagcatggaaaaaccgtccgatcacgcccccgtctgggcgaccttccgccgctaatttagcagctctcctggctcaaactgggtcaggagaattaaccttgagaaaaatcaacaaactgtcagtaatgatttgttgcctgccgtcctttgttataccgtctctgcgtttttagttgtctgaccacttctctattatcaagtttgatataggaaactccacgatgaacgctgagcgtaaatttctttttgcctgtcttatttttgcgctggtcatttacgctatccacgctttcggtttattcgatctgctcaccgatttaccccacttacagacactcatccgccagagcggatttttcggctatagcctctatattctgttattcatcattgccaccctcttgctgttaccaggaagcatactggtgatcgcgggaggaatagtttttggcccgctcttagggacactactctcattaattgccgccacgctggcctcctcgtgctcattcctgctggcgcgctggctgggacgtgatttactgctgaaatacgttggccatagcaataccttccaggccattgaaaaaggcattgcgcgtaacggtattgattttcttattctgacccgcttaatcccgttgtttccttacaatattcaaaattacgcttacggattaaccacaatcgccttctggccttatacccttatttcggcactcacgaccctacccggtattgttatttataccgtgatggcaagcgatctcgccaatgaaggcattacgctgcgctttattttacaactctgtctggcgggcctggcgctgtttattctcgtccagctcgcaaaactctacgcccgacacaaacatgtggatctgtctgcttcgcgccgcagcccacttactcacccaaaaaatgaaggatagaacgatgttgcaacattattcagtgtcatggaaaaaaggactggctgcactctgtttactggctgttgctgggcttagcggctgcgatcaacaagagaatgcggcggcaaaagtggaatacgacggactttcgaacagccaaccgctgcgtgtcgatgccaataaccatacggtaaccatgctggtgcaaattaatggtcgtttcctcaccgacgacactcgtcacggtattgtgtttaaagatggctccaacggacataaatcgctgtttatgggttatgcgaccccgaaagcattttatgaagccctgaaagaggcaggtggtacgccgggcgaaaacatgacgatggataataaagaaacgactcatgtcacaggcagcaaactggatatttcggtcaactggcaaggggcggcaaaagcgtattccttcgatgaagtgattgttgacagtaatggcaagaaactggacatgcgctttggcggtaatttaacggcagcagaagagaagaaaacgggttgcctggtgtgtctggatagctgcccggtcggcatcgtcagcaatgcaacatacacttatggtgcggttgaaaaacgtggtgaagttaaattcaaaggcaatgcctcagttctcccggcggataacacgctggcaacggttacctttaaaatcgccgaataaagccaggataaaggatgatgatgatgcaatcgcgaaaaatctggtactaccgtataaccctcatcatcctgttgttcgctatgctgctggcatgggcgctgcttcccggcgtccatgagtttatcaatcgcagcgttgcggcgtttgccgccgtggaccaacagggtatagaacgctttattcagtcttacggcgcactggcggcagttgtctcgttcttgttgatgattttgcaggccattgctgcaccgctacctgcgtttttgatcacctttgccaatgcgtcgctgtttggcgcgttctggggcggcttgctgtcgtggaccagttcgatggccggcgcggcgctgtgcttttttatcgccagagtgatgggccgcgaagtggtggaaaaattaaccggcaaaaccgtgcttgacagtatggacggctttttcactcgctacggcaaacacaccattctggtctgtcggttattgccttttgtccctttcgatccaatcagctatgctgccggtttgacttcaatacgttttcgctcgttttttatcgccaccgggcttggtcagttaccggcaactattgtttattcctgggcgggcagcatgttaacaggcggtactttctggtttgtcaccggactgtttattctgtttgccctgaccgtggtgatttttatggcgaagaaaatatggcttgaacgccagaagaggaatgcctgatgggtttaccgccgcttagcaaaattcctttaattttacgtccacaggcgtggctgcatcgtcgccattacggcgaggtgctaagccccattcgctggtgggggcggatcccgtttatcttttatctggtgtcgatgtttgttggctggctggagcgcaaacgctcaccgctcgatccggtagtacgatcgcttgtcagcgcgcgcattgcgcaaatgtgcctgtgtgagttttgtgtggatatcaccagtatgaaagtcgccgagcgcaccggcagcagcgataaactgctggcagtggctgactggcggcaaagcccgctctttagcgatgaagaacggctggcgctggagtacgccgaagccgcaagcgtaacgccgccaacggtcgatgatgccctgcgtacccgactggctgcgcattttgacgctcaggcgctcaccgaactgacggcattgatcggcctgcaaaatctgtcagcccgttttaattctgccatggacattcccgctcaggggctgtgccgtattcctgaaaaacgttcttaaggagagatgatgcgccattgtgggtggttgctgggattgttatcgctgttttctctggcaacacatgccagtgactggcaagaaattaaaaatgaggccaaagggcaaaccgtctggtttaacgcctggggcggcgataccgcaattaaccgctatctcgactgggtgagcggcgagatgaaaacccattacgctataaacctgaagattgtccgtctggcggatgccgcagacgcggtgaagcgcattcagaccgaagccgcagccggacgtaaaacgggcggctcggtggatctgctctgggtgaacggcgaaaacttccgcaccttaaaagaggccaatttattacaaacgggctgggcggagactctgcccaactggcgctatgtcgacacacagctgccggtgcgggaagatttttctgtgccgacacaaggtgcggaatcgccctggggcggcgcacaactgacgtttatcgcccgccgcgatgttacgccacagccaccacaaacgccgcaagccttactggagtttgctaaagccaatcccggcacggttacctatccgcgcccaccggactttaccggcacggcgtttcttgaacagttgctgattatgctgacgcccgatcccgccgcattaaaagaagcgccggacgatgcgactttcgcccgtgtcactgctcccttgtggcaatatcttgatgtgctgcatccgtatttgtggcgcgaaggaaaggatttcccgccttcacccgcgcggatggatgctctgctgaaagccggcacattgcgcctgtcgctgacctttaaccccgcgcatgcgcagcaaaaaatcgccagcggcgatttgcctgcaagcagttacagttttggctttcgcgaggggatgattggcaacgtgcatttcgtcaccattcctgccaacgcgaatgccagtgctgcggcgaaggtagttgccaatttcctgctctcacccgatgcgcaactgcgtaaagcagatcccgctgtctggggcgatccttctgttctcgatccgcaaaaactgcctgacgggcagcgcgaatcattgcaatcaagaatgccgcaggatctgccgccggtactggctgaaccgcacgcaggttgggtaaatgcgctggaacaagaatggctacaccgttacggtacgcattaatctttttgctgtgggcgatggtggcggtgatttatgcaccgctgatcccggcagctctcacgctgatatcgcctgctttgtcgttgacacactggcaggcgttatttgccgatccacagttaccgcaggcattactggcaacgctggtgtcgacaaccatcgcggcggtcggggcattgttgattgccctgctggtgattgtggcgctgtggcctgggccgaaatggcagcgtatgtgcgcccgtctgccgtggctgctcgccattccccatgtggcttttgccaccagcgcccttctgctctttgctgacggagggctgctttatgactatttcccgtatttcactccgccaatggaccgatttggcatcggtctgggcctcacccttgcagtgaaagaaagcgcatttctgctgtggatcttagcagcagtattgagcgaaaaatggctgttgcagcaggtcattgtgctggattcgctgggctacagccgctggcaatgcctgaactggctgctgttgccctccgtcgcgcctgcgctggcaatggcgatgctggcgattgttgcctggtcgctgtcggtcgtggatgtggcaattattctcgggccaggtaatcccccgacgctggcggtaattagctggcagtggttaacccagggcgacattgaccaacaaacaaaaggcgcgcttgccagcctgctgttgatgctgttactcgccgcctacgttttgctgagctatctgctatggcgcagctggcggcgcactattccccgcgtagatggcgttcgcaagcctgccacgcctttattgccgggcaatacgctggcgatttttttacccttaaccggtgtgctgtgtgtggttctgctggcgatcctcgcggatcagtcgacgatcaatagtgaagcgctcatcaacagcctgacaatggggctggtggcgacattcatcgctttgctcctgttactgctgtggctggaatgggggccacagcgtcgccagttgtggctatggttgcccattttattacctgctctgccactggtggcgggccagtacacgctggcgctatggctgaaactggatggaagctggacggcggtggtctgggggcatctgctgtgggtgatgccgtggatgctgtttatcctgcaacccgcctggcagcgcattgattcacggttaattttgattgcgcaaacactgggctggtcgcgggccaaaatcttcttttacgtgaaatgcccactcatgttgcgccctgtgctgattgccttcgcggtgggatttgcagtcggtattgcgcagtatatgccaacgctgtggctgggcgcggggcgttttccgacgctcaccactgaggcggtggcattaagcagcggcggcagcaacggtattctcgccgcccaggctttatggcaactgctattaccgcttattatttttgccctgaccgcgttagtcgcaaaatgggtaggttatgtcagacaaggactccgctaatgctctgcgtgaaaaatgtttcgctacgtttaccagaaagccgcttgctgacaaacgttaactttacggtggataaaggtgacattgtcacgttaatggggccgtctggctgtggaaaatccactctgttttcatggatgattggtgcactggccgaacagttttcttgtacaggtgagctatggctcaatgagcaacggattgacatcctacccaccgcacagcgtcagattggcattctttttcaggatgcactgttatttgaccagttcagtgtcgggcaaaatttactgctggcgctaccggcgacacttaaagggaatgcccgacgtaatgccgtgaatgatgcacttgagcgttcaggccttgagggagctttccatcaggatcctgccactttgtctggcggtcagcgagcgcgcgttgctctactacgcgcccttctcgcccaaccaaaagcgttactcctggatgagccattcagccgtcttgatgtggctctgcgcgataattttcgccagtgggtgttcagcgaagttcgcgccctggcgatccccgtcgttcaggtaacgcacgatctccaggatgttcctgctgatagttctgttctggatatggcgcagtggtcagaaaattacaacaaactgcgataacgcaaagtttttctcaatgcgtcagttcagaatggcgcactcaaaactacaatgtcgggattttcgatgaaacgtgtttctcaaatgaccgcgctggcaatggctttagggctggcttgcgcttcttcgtgggccgctgaactggcgaagcctcttacacttgaccagcttcaacaacaaaatggcaaagcgatagatactcgccccagcgcgttttataacggctggccacaaaccttaaatggcccttctggtcatgaacttgccgccttaaacctctctgccagctggcttgacaaaatgagcaccgaacagctcaacgcgtggatcaagcaacataacctgaaaaccgatgctccggtggcgctgtacggtaatgacaaagatgtcgacgccgtcaaaacgcgactgcaaaaagcaggtttaacgcatatctccatcctgagtgacgcgctaagcgaaccttcccgtctgcaaaaactgccgcattttgagcagctggtttatccgcaatggctgcacgacctgcaacaaggtaaagaggttacggcgaaacctgccggtgactggaaagtcattgaagcggcctggggcgctcctaagctttaccttatcagccatattcccggcgctgactacatcgataccaacgaagtggaaagtgaaccgctgtggaacaaagtttctgatgaacaactaaaagcgatgctggcaaaacacggcattcgccatgacaccacggtcattctgtatgggcgtgacgtatacgctgcagcgcgtgtggcgcagattatgctttatgctggcgtgaaagatgtgcgcctgctggatggcggctggcaaacctggtccgacgcgggactgcctgttgagcgcggaacgccaccgaaagtgaaagcggaaccggatttcggcgtgaagatcccggcacaaccgcagttgatgctcgatatggaacaggcccgtggactgctgcatcgccaggatgcatcgctggtgagcattcgttcgtggccagaatttatcggtacgaccagcggttacagctatattaaaccaaaaggtgaaatagccggcgcacgttggggacacgctggtagcgactcgacgcatatggaagattttcataacccggatggcaccatgcgcagcgccgatgatattaccgctatgtggaaagcgtggaatatcaaaccagagcagcaagtttcattctactgcggcaccggctggcgcgcgtccgaaacctttatgtacgcacgcgccatgggttggaagaatgtttccgtgtatgacggcggctggtacgaatggagcagcgatccaaaaaatccggtagcaaccggtgaacgcggcccggacagtagcaaataacattgcaattactgacgctggagcgacttcagcgtcagatacccactccacacccgcgtaaaggtcgtcatccagcacaacgcaccgaagatccacgcaaaccacgcaaaccatgcagggaataaacatcccagcacaaacagtaagatcgtttctgtgccttcggttaatccccccagatagtaaaacgacttatgtgcataaccggggttatcaatctgatgttttgctgccagtgcagcaaaggcgagaaaactgctgcccgtgccgataaacgcaaacaacaaccagccgcctgccagcgcattttgctccggtgcagcaagaataaagccaaacggcaccagcgcgtaaaagagaaaatcgagagaaatatcaagaaagccgcccgcgtcggtaagctctctgcgccgcgccagcgcaccgtccagaccatcaagcagcctgttcaacaaaatgacgactagcgccgccagataccagcccagcgccagaaacggcagagccagcacgccgatggcaaatcccactaatgttaaaccatctggcgtaatgcccggtttatcaagaacccgcacgcactgatgcaacaacggtttaatccggggatgaagatggcggtctagcacaggcactccttaaatataaagcctttctgattgagcaacagtgcggatattatggcatttttcgcttatctgcccgtgtgtaatttatgaaaatgattgaagttgttgccgccatcattgaacgtgatggcaaaattttactcgcgcaacgccccgcccagagcgatcaggcgggattatgggagtttgccggtggtaaagtcgagccggatgaaagtcagcggcaggcgctggtgcgtgagttacgcgaagaactgggcatcgaagcaactgtgggtgaatatgttgccagccatcagcgagaagtttcggggcggattatccatcttcatgcctggcacgtacccgacttccacgggacgttacaggcacatgaacatcaggcgctggtctggtgctcacctgaagaggcgctgcaatatccgctggcccctgctgacattccattattagaggcgtttatggctttacgcgccgccagaccagcggattagtgctaagggttttgtcatcacgctggcattgcagcagtattccttcggctttaattaccgccccttcagaataattttgatcctgataaacgcagcactgagtacagggctgcgctgactgcccgcctgaactgaacacttctggcggtacgtttacctccacgtccggacgataatgcgggttagccagtgcaattaatggaaatgctaatactacggcgaacaatgctcgactcacagggaactccttaacgttattgtctctgctactgataacggtagccgggtggcaaaactttagcgtctgagttatcgcatttggttatgagattactctcgttattaatttgctttcctgggtcatttttttcttgcttaccgtcacattcttgatggtatagtcgaaaactgcaaaagcacatgacataaacaacataagcacaatcgtattaatatataagggttttatatctatggatcagacatattctctggagtcattcctcaaccatgtccaaaagcgcgacccgaatcaaaccgagttcgcgcaagccgttcgtgaagtaatgaccacactctggccttttcttgaacaaaatccaaaatatcgccagatgtcattactggagcgtctggttgaaccggagcgcgtgatccagtttcgcgtggtatgggttgatgatcgcaaccagatacaggtcaaccgtgcatggcgtgtgcagttcagctctgccatcggcccgtacaaaggcggtatgcgcttccatccgtcagttaacctttccattctcaaattcctcggctttgaacaaaccttcaaaaatgccctgactactctgccgatgggcggtggtaaaggcggcagcgatttcgatccgaaaggaaaaagcgaaggtgaagtgatgcgtttttgccaggcgctgatgactgaactgtatcgccacctgggcgcggataccgacgttccggcaggtgatatcggggttggtggtcgtgaagtcggctttatggcggggatgatgaaaaagctctccaacaataccgcctgcgtcttcaccggtaagggcctttcatttggcggcagtcttattcgcccggaagctaccggctacggtctggtttatttcacagaagcaatgctaaaacgccacggtatgggttttgaagggatgcgcgtttccgtttctggctccggcaacgtcgcccagtacgctatcgaaaaagcgatggaatttggtgctcgtgtgatcactgcgtcagactccagcggcactgtagttgatgaaagcggattcacgaaagagaaactggcacgtcttatcgaaatcaaagccagccgcgatggtcgagtggcagattacgccaaagaatttggtctggtctatctcgaaggccaacagccgtggtctctaccggttgatatcgccctgccttgcgccacccagaatgaactggatgttgacgccgcgcatcagcttatcgctaatggcgttaaagccgtcgccgaaggggcaaatatgccgaccaccatcgaagcgactgaactgttccagcaggcaggcgtactatttgcaccgggtaaagcggctaatgctggtggcgtcgctacatcgggcctggaaatggcacaaaacgctgcgcgcctgggctggaaagccgagaaagttgacgcacgtttgcatcacatcatgctggatatccaccatgcctgtgttgagcatggtggtgaaggtgagcaaaccaactacgtgcagggcgcgaacattgccggttttgtgaaggttgccgatgcgatgctggcgcagggtgtgatttaagttgtaaatgcctgatggcgctacgcttatcaggcctacaaatgggcacaattcattgcagttacgctctaatgtaggccgggcaagcgcagcgcccccggcaaaatttcaggcgtttatgagtatttaacggatgatgctccccacggaacatttcttatgggccaacggcatttcttactgtagtgctcccaaaactgcttgtcgtaacgataacacgcttcaagttcagcatccgttaactttctgcgatagcagcagatatgccagtaaagaaatcccatttgactatttttttgataatcttcttcgctttcgaacaactcgtgcgcctttcgagaagcaagcattatataatgccaggccagttcttcttcaattgtcccgttttgaaaagctgtgcttgatatcgagatcatccatgataattccgccgcccatattagcttcgccgaggatttaccggagctatgattagcgcaatcagagatatagtctgagggaaaaacagcaaatttattcaacaaggcgataacctgctctggggcttcctccatgtttgctttaaaggtattggctccatggtcgccagaaagaaaatgctccattaaggcacaataactttcgctatcttcgataccccattgatcctctaaagactcgcgtcttttacttatgatatcgatcgagtcaaaaggaagcacatgatattggaaggtatctttgccaggttcaggctttcgcggccagaactccagcgtttcagaccattgcttatgatagaatcgataaggtgcgatcaattgtagcgcctgtaacttctcgatactgagcggctcaatacctttagcctgataataatgcagttgttctttttttgctttaaaaccggcccgaacaataagccccatcataattaatagataaagaaaagagcatcccgcggtaatcaggcctctttcattcaaaccgttggatgttatcgctgcgaacacaaacattacagcgacaacacatgttaaataaaacccccacttacaaagcagcatggccttattttctttaatcatccgttcaaaattactattaaatatttcccagccattaaaagaatacttctcgctcccaggatggttttgtaataaaacttttttcatcacattccctgttattacatactttagaggcgataattttatccatgcaaaaaaaatatccaacgaattttcttgatccgctggatatttcagaatatgactcgaatagcacgaaagattcactcgcttacgctatcgccccgcttccgacttcatctgctggcggactttttttcgcactacgtttacgcggtgcagcctttttcttatcagcactgccaccactgcccggagccacaatgccgcgaaactgccgcaccggcgtacgtttggcttgatcaataagctgatatagcgtccccaccagcggctgcataaagtcctgatagcgacactgcttttcgctgatttgcgtcagcaccgattcccagtgcgcggtcatgtccggtcgcgtcgccatctccggcagcgaatggaatagcgcttttccggcgtcggtggagtggatatagcgcccttttttggtcaggaaaccacgcttgaacaacagttcaataatcccggcacgcgttgcctctgtccccagaccatcggtcgcacggaggatctttttcagatctttatcctgcacaaagcgcgcgatcccggtcatcgccgaaagcagtgttgcatcggtaaaatggcgcggcggctgggtttgccgctctaccacttcacctttttcacacagcaactcatcgcctttcgccaccacaggcagtggcgtgccgtcgttttcttcatcgcgctctttgctgcctaacagcgtgcgccagcctgcttcagcaagaaaacgcgctttagcgacaaatttgcctttggcaatgtccagttcgataacacacttgcggaacaccgcatccgggcagaattgcatcagatactgacgggcaatcaggttatagaccttcgcttcgttctccgtcaggttgatcgcagaactccgtgcggtcggaatgatggcgtggtgcgcatcgacctttttgtcatcccaacagcggttgcgtatatctggatctaccactggctgcggcaacagatccggtgcatgaacactgatggcattcatcaccgcgtggcgtccggcaaaatgttcttctggcaaatagcgacaatcagaacgcggataagtgattagcttgtgcgtttcgtacagtttctggcagatatcaagcacgttctgcgcactcagaccaaaacgttttgccgcttcaatctgcaacgctgaaagcgaaaaaggcagcggcgcggattctgattcccgtttatcgttatagctggtgacaatagccggttgaccactaatgcggttaaccacatgctccgccagtggacgatgtaacaagcgcccttcttcatcctggtacggttcacacgcttcgctcggttgccagatagcggtaaaccgctcatcggcaggtgtcacgatatgtgctttgacttcaaagaagtctttcgccacgaagttttcaatctcttcatcgcggcgcaccaccagcccaagcacgggcgtctgcacgcgtcccacggaaagtacgccctgataaccggcattgcgaccgagaatggtatacgcacgggtcatattgatgccgtacagccagtcggcacgcgctcgcgccagcgcagaaacgcacagcggtacaaactcactgttggaacgaagacggtcgatcgcccgctcaaccgcctgcgggttcaggtcgtttatcaagcaacgctgtacctgctggcgcttttccggtgccagttgcagatagtccagcacttcatccaccagcaattgcccttcacgatccgggtccccggcgtgaacgatttcgctggcttcatgcaggaaccgtttgatgacgttaagttgtttggtcacggagggtcggggctgtaattgccacttttccgggacaatcggcaaatccgcaagattccagcgcgcatagcggctgtcgtaggcgtctggctgcgcctgctcaagcaggtgaccgatacaccaggtcaccacctgaccattaccgcactcgataaagccatcgcctttccggtgcggtttgggcaggacatcagcaatggcgcgcgccagactcggtttttcggcaataaacaaccgcattgaattaacgaatctcaaccatggcacgaccgccgcgcgctggcaccagttcgccaattgccgtcagttcaatgccaaactcggcggctgtagctttgacctcattttctgcttccggcatgaccgccagcagcaaaccgccagaagtttgcggatcacacagcagatcgcgcacttcacgcggcatttcacccatcagatgaccgtagctggcaaagttacgttcagtgccgccaggtactgcgcccaacttaatgtactcttcaacaccggggagtttcgggatcgcttcatagtcgacgcgtgcctgcacaccagccccctgacacatttcgctcaagtggcccagcagaccaaagcccgtaacgtcggtcatcgcttttacgccttcgatgttggcaaaggacgcgcctgcgatgttcatccggcacatcacttccgtcgccagtccctgatgttctggtttcaacagtgattttttctcagccgtggtaagaacgccgatccccagcggtttcgtcaggaacagtttgcatccggcttgtgcggtactgtttttcttcacccgctcggtcggtacgatccccgttaccgccagaccaaaaatcggctccggcgcatcgatggagtgaccgccagccagcgcaatacccgcctgacgacatgcatagcgtccaccttcggtcacttcgcgggcaatttctggggaaagtttgttaatcggccagccgaggatcgcaatcgccataatcggtttgccccccatcgcgaagatatcgctgatggcgttagtcgccgcaatgcggccaaaatcgaaaggattatcaacgatcggcataaagaagtcggtggtactgataacgctggtgccattgcccagatcgtacaccgccgcatcgtcgcgggtttcattacccacaagcaaattcggatcaacaaacttcgcctgctcactatgcaggatggtttccaacacttttggggaaattttacagccgcaaccagctccgtggctgtattgggtcaaacgaatcgagttctcgctcatggacatctcctgtcaatgcaatccgggtatggtaaccctcattccgtgaagtgataagtgagagtgtctgaattcctgcgcctttgctcacaatccagacagtttcgcgacaattatcagaaataagttacaaacggcgtcgggtccgggacgttaatcgacgtagatgctttcagctgcggcgtaccgaggtagagaaaaccgacaattttatcctgctcacggcaaccgaatgcttcacgcactaccggactttcagttaatgcgccactgcgccagatgccgccaaacccctgggcaactgctgccatttgcatcgccatgaccgcgcatccggcagacatttcctgttcccagcgcgggactttatgattctcttcgcatttcgccaccaccgtgatgatgagcggtgcgcggaacggcgcattacgggctttgtcgatagctttgtcatcactaccggcagcaatcgccccctgttccagtacggcgctgaaacgctcgcgcccttccccttcaatcacaaaaaaatgccacggttgcatggacttatggtccggcgcacgcatacccgcacgcaggatgttttgcagttgttcacccgttggcgcgggttcagccaagcgggaggcgctacggcgattgatcaatagttcgagtgcatccatttgattaactcctgtcgtgatatttattcacaaaattaacacgagagtggattttgttacagcacagtccgcaattcctgctgacaagtaccggttgggtcattacgataaccacatctattgcgcctgtgacaggtgtgaccttaagttgggagaatacatgcgaaccctttggcgatttattgccggattttttaaatggacgtggcgtctgctgaatttcgtccgtgaaatggtacttaacctgttctttattttcctcgtactggttggtgtggggatttggatgcaggtcagtggtggtgattcgaaagaaacggccagtcgtggcgcactgctgctggacatttctggtgtgatcgtcgataaacccgacagttctcagcggtttagtaaattaagccgccagctgcttggtgccagttccgatcgtctgcaggaaaactcactgtttgatatcgtcaacactattcgccaggcgaaggacgaccgcaatatcaccggtattgtgatggatctgaaaaacttcgcaggcggcgaccaaccgtctatgcagtacatcggcaaagctctgaaagagtttcgtgacagcgggaaaccggtttatgccgttggcgagaactacagccaggggcaatattatctcgccagtttcgccaataaaatttggctgtctccgcaaggcgtggttgatctgcacggctttgccaccaacggtctgtactacaaatcgttgctggataagctgaaagtttccacccatgtgttccgcgtgggtacgtataaatctgccgttgaaccgtttattcgtgatgatatgtcaccggcagcccgcgaagctgacagccgctggattggtgagctgtggcaaaactatctgaatactgttgccgctaaccggcagatccctgctgagcaggtattccctggcgcgcaagggttgcttgagggtttaaccaaaaccggtggcgataccgcgaaatatgcactggaaaacaagctggtcgatgcactggcatcgagtgcggaaatcgaaaaagcactgaccaaagaattcggctggagtaagactgataaaaattatcgcgccatcagttattacgattacgcattgaaaacgccggcagataccggtgacagcatcggtgtcgtctttgctaatggcgcaattatggatggcgaggaaactcaggggaatgttggcggtgataccactgcggcacaaatccgcgacgctcgccttgacccgaaagtgaaagcgattgtcctgcgtgttaatagcccaggcggcagcgttaccgcgtctgaagtgattcgcgctgaactggcagcagcccgggcagcgggtaagcctgtggttgtatcgatgggcggcatggcggcatctggtggttactggatttccacgccagctaattacattgtggctaaccccagcaccctgaccggttctatcggtatcttcggcgtgatcaccaccgtagaaaatagtctggattcgattggtgttcatactgatggtgtctcaacttcaccgctggcggatgtttctatcaccagggcactgccgccggaagcgcagctgatgatgcagttaagcattgagaatggctataaacgctttatcacgctggttgctgatgcgcgtcattcgacgccggagcagattgataaaattgcccagggccacgtctggaccggtcaggatgcaaaagctaacgggctggtcgatagtctcggggatttcgatgatgcggtcgccaaagcagcagagctggcaaaagtgaaacagtggcatctggaatattacgttgatgaaccgaccttcttcgacaaagtgatggacaacatgtctggttctgtccgggcaatgttgccagatgcgttccaggccatgttacctgcaccgctggcctcggtagcctctaccgttaaaagtgaaagtgacaagctggccgcgtttaatgacccacaaaaccgttatgcgttttgcctgacctgcgccaacatgcgttaagtcttgtactgagtggccgacagatcgtcggccacattattttttacgtcgacgaatcctcttcccgctgtttcgccccatatttccttatccgcatagtatcaggtgcgctccccctgcctcacgtatatacttttgctctttcgatatcattcatatcaatatcatgcaaaagaaatcaatttacgttgcctacacgggcgggaccatcgggatgcagcgttccgagcagggttatataccggtgtcaggtcatctacaacgccaactggcgctgatgccggaattccatcgcccggagatgccagatttcaccattcatgaatatacgccgctgatggattcttcagatatgacgccggaagactggcagcatattgctgaagatattaaagcgcactatgacgactatgatggttttgtcattctgcacggcaccgacacgatggcgtataccgcctctgcgctgtcgttcatgctcgagaatctcggtaaaccggtcattgtgacagggtcacaaatcccgctggctgagttacgctctgacggacaaattaatctgctgaatgcgttgtacgttgcggcgaattatccgatcaacgaagtaacgctctttttcaataaccgattgtatcgcggcaaccgcactaccaaagcccatgccgatggttttgatgcgtttgcctctccaaaccttcctccgttactggaagcaggtatccatattcgtcgtttgaatacgccacccgccccgcacggtgaaggggaattaatcgttcatccaatcaccccacaaccaattggcgtagtgacgatttatccagggatttctgctgacgtcgtgcgcaattttctgcgccaaccggtgaaagcattgattctgcgctcctatggcgtgggtaatgcgccacaaaacaaagccttcctgcaggaattacaagaagccagcgatcgcggtattgtggtggtcaacctgacacaatgtatgtccggtaaagtgaacatgggtggttatgccaccggtaacgccctcgcccatgccggcgtaattggcggtgcagatatgactgtagaagccacgctaaccaaactgcattacctgcttagccaggaactggatactgaaaccattcgcaaggccatgagccaaaacctgcgcggcgaactgacgccggatgattaaggagactgtaatgccccctcgcgccctgttactggtcgatttacaaaatgatttctgtgctggtggcgcgctcgccgtgccggaaggtgacagtacggtggatgtcgctaaccgcctgattgactggtgccagtcgcgcggtgaagcggttatcgccagtcaggactggcacccggcgaatcacggcagttttgccagtcagcacggtgtagagccttatacgccaggccaactcgacggtttgccacaaaccttctggccagatcactgtgtgcagaacagtgaaggcgcacaattacatccgttactgcaccaaaaagcgatcgcagcggtgttccataaaggcgaaaatcctttagttgacagttacagtgccttttttgataacggccgtcggcagaaaacctctctcgatgactggttacgcgatcatgaaatcgatgaattgatcgttatgggcctggctactgactattgcgtgaagtttaccgtgctggacgcgttacagttaggttataaggtaaacgtgattaccgatggttgtcgtggcgtgaatatccagccccaggacagtgcgcacgcgtttatggagatgtcagcagctggggcaacgctatatacgctggcagactgggaagagacacaggggtaattttacgctggcctacaattctgtactggcattgtaggccaaataaaacacgtcagtggcacatctggcaattgatgccatcaacgaaagatttaattcacctcagaaatctcttccaacgacaccttccgcgtttcgatgccaaaaatggagagaaccagcgcacagagcaataacataacaccaagtaccataaacaccgtgatcgacccataatgtgttaataatgccgcaacgccatagggcgtgaagactgcgacgatccgtccgacggcattaacgaaacccgaaccgcgcaggcgtaaatgcgttggccaaagctccgggatataaaccgccgacgcgaagcaaacatacatgtataaaaagaagatcatcaccagtccatagattaaaatcgcccactctgtagtctgaattgaatagatatagcctaacacggcaataataataagtaaggtggagccaaataaccgacgaggaaaatgatcaataattaatgccgcaataaatattcctaccggagcgccaatcataataacagcggtcattaatattgatttatcgacatcaatgccggagttaacaaatatggtcggtatccatacggtgatggtataaagcgaaatgttcattgcaattaaaacagtaatcgcgactaatgtacgtcgtaacatttcacctttaaacaggagccagaaagtacccttgattactttaaccttgctgttgctctgatacgaagtaagcgggggtaaacgaatactcttctctctttcaatttgctgctctacttcacgaagttggcattctgcacctgcgatttgccctttccctgccagccatcgtggcgactcgataaagtatttacctgagagaaaccaggctaacagtatgccaataccacccagcagaaacattattcgccaactaaaaaaagcgataaccaccacgcctatcgccgcagacagcatgggcgaccagttaccaacaaatgagagccgcgcggaccattttccacgcaccgtcgcggggataaactccgtaaatgaggcatagccaaccataatcagcgcccccattcctgttcccatcaggaagcgaaagaagatgagccagtacatatcagggacaaaagcggcccctgttgcagcaataccgacgatgagaagatttatgcgaaacgccctgcgccgcccaaagtagtcaccaataaacccaccagtaagtgagccgatgaaataaccaaacattaatgccgaggtaaaggcggcattgaggaaattatttgaccatccattgcttaccagctttgctaagacgacattaccggagtaactcaaaaaccctgttaataacagactaaagcttataataccaaatatacgataatgaaaccgggccaaaggcaagcggtccagtcttgcgccaatttgatcatattgttccattaggtgcctcggatttgctaaaaaggtagcaattgcggcaaattcacttgccgcatctttatcatcattttatttcaaggcgcaggaacaaataatattgacaacgtgtgcttaaattaccacaccagctggatattattgtctttgcaaaatgctatccactctgcacccggtgatttatcagttattatgtaattaatatgactaaaatcagctaactggacaaaagctttgcgatcaaacttagagtgatcaaccaataacgcaacttctgtcgcctgacggatcattgtctttttgatttcagcttccgcttcattagagtccagcgcgccgctgttaatatcaagacctttacaactcattaccatgatatcgacatgatagcgcctgatgatctctttagtaattcttccttgcagtgaaagtgtatttttgtttagttccccacccgttgaaacgactttaatttctgactgagccagaacatgaatcgcttccgccgagttggttagcaacgtcaggccactacggtcctgtaacaatttgagcaattccattacggtactactggaatcggctgccatggtggttttattgtcgataaagggtagtgccttgcgtgcaataagctgcttctcttcataaaacgatgaagcgcgcttataaaaatggatattctccgtcaacatcgctgtatttaaaacagcaccaccataggttctggtcaaaaagccttcatcttccagcttctcaagatcgcggcgaatggtttcttcggttacctgaaaaatcccactcaaatttgagactgtcacctttttatcgttggcaaccatttgcttaattgcctgaatcctgtcttttgccgccacgattacacccctgtatctttttacatcacattagcgcgattatcgcataaccgatgtttactttcaaaataacctgtttgaatcacagattttcatcacagttttcacagaaacagaggtgaatcgtgttgagtatttaacgctccagggcctctgccatttccctcatcaatgttgcgtctgcatccgataagttgatattcagtgccgcgacattttcgcgtacctgttccggtgcagtagccccactaagaatggagattaaatcactctgttttaatatccacgccagtgccagagtgggaattgtgcactgataacgagcacaaagtggctgccactgttcaagcatatcaatcactttcagcatgttttcacgctggaaccagactttatttgcccgagcgccgcccggaacgtaatcacgagtgatggtgccggtcaacaatccctgctctagcggggaataaacctgaaccacaatgccattatcacgacatagtggcagcagttcgttttccattgcccggtcgaggatactgtatttcgcctgaataatatccagttcaccatattgcagatactcgcggatatggtcagcatcgacgttagcagcgcctatagcgcgaattttcccttcagactttaactcattaagcactgcgacagtttcagcgatcggcgtaaaaaatggcggcaccgactgccagtgcgtcatgtagatatcgatgtaatcaatacccagacgttgcaagctcgctgctacctcttcgcggatagattccggggaaaggtttttatacaactgccgatcgccaactttgttgaataaacttccttttcgttcccagacaatgccgcatttggtttctactacaacctgttcacggggcagtttttttaacgcctgaccgacgataacttcactattgccaaagttatatcctggcgcagtatcaatcagattaatgccacaacgatgggcttcaagaatcgtatcaatacatatttgccgatcgagatcgccattccatgcaggaccgccgccaatggcccatgtccccaaccccattcgcgaaagcgtaatatccgttgtgcctaaaggtatctttttcatttgccttcattatccttcgtattcttccagcaattgttcgaccagctttctgttttttacgccggtggtggcaccgacgcttagaaccgagatagccgccgttgcattggcaaagcgtgcgcattcacgcagatttttgccttctaacagtgccgcaataaaacctgaagcaaagttatcgcccgcgccaatggtgtcgatggcggttattcctgcgaccgccggcaccttcatcgtcatgtcaccacgcttgataaagcagccgtctttacccgttttaatcaccaccgtttttacgccgcacgcaagaaagcagtcagcaatttcatccagtgtctctttcccggtgagtaattttgcctcggcaaaattaggaaacagataatcgacataactcaatgcttcgcaaatatcatccagcgtttcattcaaccgcggtttgatcatatcggcacagataatcatctgccgggctttagcttgcgtaaaaatttctgttagcgctttaccatccaatagtggactgttgaaaatactggccagtgataataatttcgcctgagaaaaccgcgcaaaatcaacatcgtcaatattcaatttccacagactgccattacggtttgtgacaaacgtccgctcgccatcctccgtcaccagtccaacgttaatagaggtatctatgctgacgtcctgcttcaggctttgaatatcaatattctctttgcggcaatggtcgagaataaattgccctgcggcatctttaccaatacgactcattaatgctgtgcgatggcccagacgagaaataattgttgcttcatttattgcatcacccccggtggtcattgcgattctttcaagaggataagaatccacatcaaagatatttttactgaccggttgcaatggaatatcaacaatagcggcacctatacaaataacgtcgagattatccatatcattattccgctttgccatcagaaccgaacagtttaattttttccaatgcccgttcttttacagctttacgtacttcacgttctaaatgcaggaaaggctgatcctggttttctttcactgcaaccattgcggcctgacagagctccgtatgaatgttgattttcgcgatacccaacgaaattgcagttttaatgtcggcatcactgatccccgatgcaccgtgcaaaaccagcggaacagaaacggcatcgcgtacgcgtttgacgacctcaaagttcaattgtggctctgacgtataaaccccatgctggttgccgatggcgacagccaatgaatcacagcccgtacgttcaacaaattcagccgcctggtcaggatcggtatagtgatagcccgccagcgcttcctcataaacggtttcattaccgacatgccctaattccgcctctaccggaatacccagcggatggaagaaatcgacagcctctttggttaaacgaatattttcttcgaaatcaaacgcggaagcatcacgcattaatgaattcataccatgagtccaggcgttatgaataatctccatactccgaccatgatcccaatgagttattaccggcaccgttgctttttgtgccattgataccatcatgtgagagaaatcttcaaatgaggtgttaccgacaaaacctgtaccaaaagaaataataaccggggatttcgcttcttcggctgcgtcgataacgcccatcaacatttctgcattccatacgttaaaatgggcaattgcataatgtttatttgtggcatcgttttcccaatatctgatatctgcgagcatgttctgttctcccgtattaattaatcgctaattttaataacgcctttaataatgtcgcgtttgttgttaactgactcttcaaatgcctgttgtacatcccgataatcgtaaatatgcgtcaccatcgatttcacatcgaatcgccctgaagaaatagcttcaatcgtgaccggataacgattggcatagcggaataccgtctggatagtgacttcgcgattgattttgaggaaattgattgccgaatcgccgggtacagtaccaacaatcataattttaccgccgcgcattaccagataaggtgcctgtttaacggtgaccgcagaacccgctgtttcgaaaacaatatctgcgcccatgtcttcggtaaattgctgacagcgtgcaatagtgtcttcttttgcgccgttaataaccactgtcgcaccaagctgttccgccattgccagacgtttttccagcacatcaacgacggcaatttccgttgctcccaggcatttgcacgcttgcaacgtcatcaaaccaatacaacctgctcccagaataattatcttcttacccggtttaacatctgccagcatcgcggcatgcatcccgactgcggcaggctccaccagcgccccttccatcgtgtccatattgtcgggcagtttgtaagtaaagctctccggatgacacagatagtgcgttaatgcgccgcggtagttgggttgtgtcgccataaaatcaacgtccgggcagatgttatatttgccttccagacagtaacgacagtgaccgcaaggaacgccaggttcgatatttacccgatcccccggtttaaatttgcgcacgcggcttcccacagccacaaccgtcccggcgcattcatgacccaggccaatttcttgatttgggtctttaggcggaataaacgggcctgattcaaaaccatgtacatctgaaccacaaataccgacatattctactttaatcaaaacttcatcttctttaggcactggtatttctgctgaaataattttcattgtgcccggcacctgcaatattgcttttgaatttttcattttgaatccacccgtattatttattggctactgcatcaatacttaaactttcaacggagacacctttggtttcgattccaatggtggcgatagcaattgcgacaataattgaaaccgcccccagaagaataaagactcccgtaacgccataactactgagcagcactgcaacggcataaggtgcggcaataccactgattcgccctaccgcattcgccagaccggagccacggagtttggcctctgtcggccagatttcagggacatacactgccgaggcatagcaaacgtacatatagacgaaagtaatcaggaagaaaccaatcaacgttatgagcaacatactggtttgcagtgaatagatatatccgagcaccgcaatcaggattaatagccccacacccattgttttacgcggaattttatccatcaccagcatggcaataaaaataccaaatggcgcgccaaacatactcatggtatttaaaacaatcgagtcttttaaattaatcccctgggtcatgaatattgttggcaaccagttaattagtgtgtactgcacaacgttcatggcaatcagcacacaagagcctaatatcacgcgtttcagtaatactcctgtcagtaaggctgaatacggcaccgcttgtggcgctttaccgtcatcagcaataaccacaggcggcaaaggtttacccgtctggcgtatgacgccttcttctatactccgcatgactttctcggcttcctgataccgtccgcgcgattccagccagcgcggggattcaggaaagtagcgccaggccagcgccgtagcgataagcgacaatattgcagggataagcagttgtacccgccagttccactctgcactaatcagcggcgtgagtcccatcgctatcaatgaacagagcggatatgaccagttgccaataaaggaaacccgacttgaccacgttccacgatttctaccgggcatatattcggtgaaaccagcaaacagcgtaaccagtaaagctcccagcccaactcccatcacaaaacggcaggcaataaggaaatccatattcggtgagaaagcaccgacaaccatcgaggcaatatgaatggcctcatagaggatgaacgcatttctgcgaccggttttgtcgccaatgatgccgcccaccagcgcaccgagaaacattccggcggtcgtgattgctgagaatgtggctgtggtggaattatctgtccagcccaacgctttcagctgcgcgaggatcaagccaccaacggcattactccagcagacaagcaagccaaacgcgacgatggcaaacattgatgaatgccagcggcaatccggtaagcgatccagccgtgcaccacaatgcggttttgttatctgttccatgcgataacgttccttcaggagagtggttattcatcaaagtcgtaagtcatgatcactttgattgcggttttatcgaccatcgcatcaaacccttcgcgccattgcgacaggccgatacgatgcgtgatcatcggtttgactttgatagcgccgctggctaatagcctgatagcgttacgccatgaggtggagtcataggccatatgcccaatgatgcttttgttccaggcggtaatgtcattaatcgagaaatcaagaggtttgaagcccattccaacgcgtaccacttccccgttcgggcggagcatttcgatggcttgtttcagtgcgatattggcaccggagcattcaatcaccagtcccagattgtctttgccacaaatttgctggcagcgcgccaccacatcttcggtagaaccatttactactgccgtcgcacccagttcttttgcaaccgggaagcggaccgccacatcttcttgcagaccaacgacgacgatatttaccgcccccataattcgcgccatttgtacggagaacagcccgagtgggccagtgccgatgacgaccacatcctgaccaggaaggaatttcgattgctgcgcgatggatttgtaggcattacagatagggtcaagtacggctgcgtcctcataatcaacaccatcagggatttcccacaacgcatgacgatgaattttgagaatttcaccaggaaccagacaatatttggaaaaaccaccgccccaggtattattatccagaccaaggtttactttttctgtacaacacagaaaatcaccttgttcacaggccggacaaacaccgcaaacgtgaccgctgttatccgatacgacgcgttgccccactttccagtctttgactttttcaccaacctgcgcaatacaacctgcgaactcatggccgcggatagagttaaactcatcagaaccgctatcgacattgtagtgcttcatgtctgcgccgcagattgccgcggctttaatttcaatcactacatcttccgggccacacatgggttgtgggacatcaatcatcttgtagccgccaaaggccttgccaaaccgagccagtgctttcattgcgtcatcctctgtgtttagttttgcttagatggccatcatacttacccacatgatttttgaggtcaacattaaatctgtaaaacacagataatgatctgcgttttacaactcagatcacaattacgcagaaaatggctgggtctgttacaggttgatggaaggcggggcgcaaaaagagcaaattcgagagggattaccggccaaataggtctgagacttaagttcaggagaagtcattcaggtgtgaacgggacggcaagagatcggactgggacttagccaggtcatggcgagataattgagatgagtcgtggggtcattgttggctatccccttcatagccgaggcaaaaaggggatgaaccacttacttaaacatggcaataggctttgctgagataccaaaatcttcttttaactgctgtttgctcttcatgaccatctgaccatttgtgtcaattgtcatatgctgtgcttcgatattatggcgggcttgccacagcatcaccagttgcaggcagttctctttttgttcctcggtcaacgcaacgccatcaggccatttccccagttcaacggcggtcgacaaacgctggtatacctcaggcatcatgctgttgataatgtcatcaagattcataatttttccgctcctgtggaataagttgctgaatcgttttttcaaccgttgatttcttcgccgttttcgccatcggtaaagcgtaaagaggcagagttaacacaataacgttcgcccgttggctgcggcccgtcggggaagacatgccccagatgggcatcacagttaccgcaacgaatttctatgcgctgcattccatgtgacaagtctttgatataacgaatggattcttcacttaccggttcgtagaaactgggccagccacagccggaatcatacttggtttgggaatgaaacagcggggcatcgcagatcaaacagtgatatacgccgtcacgcttgttatgcagtaaacgacccgtaaatggcggctctgtcccatgattctgcgtcacgtaaaactgcatctcggacaaattttttttcagttcttctgccgaaggtttattagccatttgctcacatctcactttaatcgtgctcacattacgtgactgattctaacaaaacattaacaccaactggcaaaattttgtcctaaacttgatctcgacgaaatggctgcacctaaatcgtgatgaaaatcacatttttatcgtaattgccctttaaaattcggggcgccgaccccatgtggtctcaagcccaaaggaagagtgaggcgagtcagtcgcgtaatgcttaggcacaggattgatttgtcgcaatgattgacacgattccgcttgacgctgcgtaaggtttttgtaattttacaggcaaccttttattcactaacaaatagctggtggaatatatgactatcaaagtaggtatcaacggttttggccgtatcggtcgcattgttttccgtgctgctcagaaacgttctgacatcgagatcgttgcaatcaacgacctgttagacgctgattacatggcatacatgctgaaatatgactccactcacggccgtttcgacggtaccgttgaagtgaaagacggtcatctgatcgttaacggtaaaaaaatccgtgttaccgctgaacgtgatccggctaacctgaaatgggacgaagttggtgttgacgttgtcgctgaagcaactggtctgttcctgactgacgaaactgctcgtaaacacatcaccgctggtgcgaagaaagtggttatgactggtccgtctaaagacaacactccgatgttcgttaaaggcgctaacttcgacaaatatgctggccaggacatcgtttccaacgcttcctgcaccaccaactgcctggctccgctggctaaagttatcaacgataacttcggcatcatcgaaggtctgatgaccaccgttcacgctactaccgctactcagaaaaccgttgatggcccgtctcacaaagactggcgcggcggccgcggcgcttcccagaacatcatcccgtcctctaccggtgctgctaaagctgtaggtaaagtactgccagaactgaatggcaaactgactggtatggcgttccgcgttccgaccccgaacgtatctgtagttgacctgaccgttcgtctggaaaaagctgcaacttacgagcagatcaaagctgccgttaaagctgctgctgaaggcgaaatgaaaggcgttctgggctacaccgaagatgacgtagtatctaccgatttcaacggcgaagtttgcacttccgtgttcgatgctaaagctggtatcgctctgaacgacaacttcgtgaaactggtatcctggtacgacaacgaaaccggttactccaacaaagttctggacctgatcgctcacatctccaaataagttgagatgacactgtgatctaaaaagagcgacttcggtcgctcttttttttacctgataaaatgaagttaaaggactgcgtcatgattaagaaaatttttgcccttccggtcatcgaacaaatctcccctgtcctctcccgtcgtaaactggatgaactggacctcattgtggtcgatcatccccaggtaaaagcctcttttgcattacagggcgcacaccttctctcgtggaaacctgcgggtgaagaagaagttctgtggttgagcaacaacacaccgttcaaaaatggcgtcgctattcgcggtggcgtaccggtttgctggccgtggtttggtccggcggcacaacaaggtctgcctgcgcacggttttgcccgcaacctgccgtggacgctgaaatcacatcatgaagatgctgatggcgtagcgctgacttttgaattgacgcaaagcgaagagacgaaaaaattctggccgcacgactttacgctgttagcgcatttccgcgtgggtaaaacttgtgaaatcgatcttgaatcacatggcgaatttgaaaccacctctgccctgcatacctactttaacgtgggtgatatcgctaaggtaagcgtcagtgggctgggcgatcgcttcattgataaagtgaatgacgcgaaagaaaatgtactgaccgatggtattcagaccttccctgaccgtaccgatcgcgtgtatctgaatccacaagattgcagcgtgattaatgatgaagcgctgaatcgtattatcgccgtaggccaccagcatcatctgaacgttgtcggctggaacccgggaccggcgctttcaattagcatgggcgatatgccggatgatggctacaaaacatttgtttgtgtagaaacggcttacgcttcagaaacgcaaaaagtgaccaaagagaaacctgcacatctggcgcaatccattcgcgttgcgaaacgttaatttacgttaatgttgtgtgccgggtgcaatgcatccggcacacaacatcacaccatatccagcgcagtttttccttttggtgccggatatgccttatccagcatagctaattccgctgaagaaagttcgacctcaagcacagccgcattttgttggacatgggcaatcgtggccgcttttggaatcgccatcacaccctgatgactgatcacccacgccaacaatacttgtgccgcgctgatattgtgagcatgtgcaatttcgttgactaccgcgttttttaacagtccattgcgcaaccgcccggcctgggctaacggactgtaagccatcaccggcatctgctgttgctggcaccaggggagtagatcgtactcaattcctcgtgaaccgagatggtaaagcacctgattagtggcacactgatttccccccggcagctgccagagttcctgcatatcagcataatcaaggttagaaacgccccagcggcggatttttccctgggcgatcaatttttccatcgctgcgacagtctcttcaaaagcgaaactgccagaccagtgtaataagtaaagatcgagataatcagtattgagacggcgtaaactggcttcgcatgcatttatcgctttttgcccgccagcattccacggatagactttagagacgagaaagaccttctctcgcagaccggttaatgcttccccaaccaccttttcggcaccgccatcggcatacatttcggcggtatcaatgagggttaaaccgagttcaatgcccgcgcgtagtgcagcaacttctgttttgcgctgactggcatcttcgcccatataccatgttccctgccctacggctggcagtgagacatcgccactaaattgaatcattttttgttgcattgtttcctcccaggtattgcaccaccgtaatgcaaaacagggcgtgacgccctgtttttatgcacaaaatgccctggaaagatgcattatcagaatttgtaggtgatcccggtagaaatcaggccagtccaggatttatccaccatcgggctgtcagtaacttcatcagacagacgggtgtagcgtgcggtaccgtaaacactccagtcgccgaggaagttgtagctggcgctcagctccaggtaagggctccagctgtcgttcgggttatagccacgcagaccgctgcgagcggactctttgcgcgatacgccataatagtattcgttctggttttcgctgttccactgcacaccaatacccggagtcacggtcaggccaccgttggtgtaacgatacaaccaggccatatcccagacgatgccgttgctgttatccagggtatcgccagccagggtggtacgcaggtaaccgtactgggtaaagtgagcataagacagaccagccatcatggtgctcttacggtcatccaggtgacgcatttggtgatcgccactgtctttcgctttgaagtaaagcggcgaccagtaagcggtaattgaaagtttatccgttgcgtcattccacaggtagtaaccaccacctaagccacggaaccagaagttatcgccttcatagttgattaccggtactgggtaaacatcggtatcgtaatctttatatgggtgttcaacgacacctacgcctgcgcccagggaaaatttaccttcagcgtgcgctacgcctgcagacgttgcgataagcactccaagtgccagaagtttgagtttggtcacaattaatcattccttaaacaaatgtttagcgggcgacaaagtttacccgtcaatacatcgaaacccaacctttttacgttttcattttttaaagtaactgtttaattttcctgacgcggatgacaccgcgcttacagccaaatgaatttagcgttactggcgagcctggtctttacattaattatgcaaaatttatggatgagttgttgatatgccattgaaattaagaaagccgtgcaggcaagttttccatttgccatctacgcttaattttgaaggtgtatcaccgggcacgttgttctcatcgtcgataaaatggcatgagagttgctgtgttttagcaagagacgtcgttcagtttacctcttccgggagcctctactattcatatgaacggctcttaacctgtgctaaaaaacgaaaggacggcataccatgaatatattcgatcactatcgccagcgatatgaagctgccaaggacgaagagttcacactgcaggagtttcttaccacttgtcggcaagatcgcagtgcttatgccaacgcggctgagcggctattgatggctatcggtgagcctgtcatggtcgatacagcccaggaacccagactttctcgactcttttctaaccgggtcattgcacgttatccggcgtttgaagagttttacggcatggaagacgcgattgaacagattgtctcttatctgaaacacgcggctcaggggctggaagagaagaaacaaatcctgtatctgctggggcctgtgggtgggggtaaatcatcgcttgctgagcgactgaaatcattaatgcagctcgtaccgatttatgtattgagcgcgaacggtgagcgtagcccggtcaacgatcatccgttctgtcttttcaatccgcaggaagatgcgcagattctggaaaaagagtatggcattcctcgccgttatctcggcaccatcatgtcgccgtgggcggcaaaacgcctgcatgaatttggtggcgatatcactaagttccgggtagtgaaggtctggccgtcaattctgcaacaaattgctatcgccaaaacggaacccggcgatgagaacaaccaggacatctccgcgctggttgggaaagtcgatattcgtaaactcgaacactacgcgcagaatgacccggacgcctacggctattccggtgcgctgtgccgcgccaatcaggggatcatggaattcgttgagatgtttaaagcaccgattaaagtgctgcatcccttgttaaccgccactcaggaaggtaactacaacgggacggaaggtatctccgccctgccgttcaacgggattattctcgcacactcgaacgagtccgaatgggtcactttccgtaataacaaaaacaacgaagccttcctcgatcgtgtttacatcgtgaaggtgccgtattgcttgcgcatttccgaagagatcaaaatctacgagaaattgcttaatcacagtgaattgactcacgccccatgcgcccctggcacgctcgaaacactgtcacgtttttccattctttcgcgcctgaaagagccagaaaactccagcatttattcaaagatgcgggtttatgatggcgaaagtctgaaagacaccgatcccaaagccaagtcgtatcaggaatatcgtgactacgccggtgtcgatgaagggatgaacggtctgtcgacgcgttttgcgtttaagatcctctcccgcgtgttcaacttcgatcatgtagaagtggcagcaaacccggtccatctgttctacgtcctggaacagcagattgagcgcgagcagttcccacaagagcaggcagaacgctatctggagttcctgaaaggttatctgatcccgaaatatgccgagtttatcggcaaagagatccagacggcctaccttgaatcctattccgaatatgggcaaaacattttcgaccgttatgttacctacgcggatttctggattcaggatcaggagtatcgcgatccggataccgggcagctgtttgaccgcgagtctcttaacgccgagctggagaaaatcgagaaaccggcggggatcagtaatccaaaagatttccgcaacgagattgttaacttcgtactgcgcgccagagcgaataacagcggacgcaatccgaactggaccagctatgaaaaactgcgcacggtcatcgagaagaaaatgttctccaataccgaggagctgttgccggttatctcgtttaacgccaaaacgtcaaccgacgagcagaagaaacacgacgactttgtcgaccgtatgatggaaaaaggctacacccgtaaacaggtgcgtttactgtgcgaatggtatttgcgcgtacgtaaatcgtcttaacaaccctggcccggtacacatgttaccgggcctacaacgacagcgaaccgtgggcctgagaagcggcaacacaggcgtagcatacagttggcaaatgtagtacggggggcatatgacctggtttattgaccggcgtctgaacggcaaaaacaaaagcatggtgaatcgccagcgttttttacgccgttataaagcgcaaattaaacagtcgatctccgaggccattaataagcgttcggtgactgacgtcgacagcggcgaatccgtatccattcccacggaagatattagcgaaccgatgtttcatcaggggcgtggcggtctgcgccaccgcgtgcatccgggcaatgaccatttcgtccagaacgaccgaattgaacgtccccagggtggcggcggaggttccggcagtggtcagggccaggccagccaggatggtgaaggtcaggatgaatttgtctttcagatttcgaaagatgagtatcttgatctgctctttgaagatttggccttaccgaatctgaaacaaaaccaacaacgccagctgaccgaatataaaacgcatcgggcgggttataccgctaacggcgttccggccaatatcagcgttgtgcgttcattgcagaactcactggcgcgacgcacagccatgacggcaggcaagcggcgggaacttcatgcactggaagagaatttggccatcatcagcaacagtgaacctgcgcaactgctggaagaggaacgtctgcgcaaagaaattgcagaattacgtgccaaaattgaacgcgtcccttttattgacaccttcgatttacgttacaagaactacgagaagcggcccgatccctccagccaggcagtgatgttttgcctgatggacgtttccggttcaatggatcaatccactaaagatatggctaagcgtttttatattctgctgtatctgttcctcagcagaacgtataagaacgtggaagtcgtatacatccgccatcatacccaggcgaaagaagtcgatgaacatgagtttttctactcgcaggaaacaggcggcaccattgtttccagcgccctgaaactgatggatgaggtagtgaaagagcgttataacccggcacagtggaatatttacgctgcacaagcatcggacggcgataactgggccgatgactctccgctttgccatgaaatcctggcgaaaaaattattacctgttgttcgttattacagctatatcgaaattacccgtcgtgcacatcagacattgtggcgagaatatgagcatctgcaatctactttcgacaactttgcgatgcagcacatccgcgaccaggatgatatttatccggtgttccgtgaactgtttcataaacaaaatgcaacagctaaaggctaaaactatcagccaggtcattatcgcctggctgatttttagcttactgtaaattatctcatttattacatacattagcttacaatcgctttaaatatgacagcataacctttacataatttagttccagaaaacaatcattcggaaaaatgattcagtcaacacgtatttccatggggttattctttaaatattttttatcgttaacgaaaattgatcctggtcaaaactatatatctctgccatcaataaaatccagcactcacattgctctcctttttatggtttctatgggtacacaaaaattaaaagctcaaagcttttttattttcagtttattgctgacgttaattttattttgcattactaccttatataacgaaaacacaaatgtaaaactcatcccacagatgaattacctgatggttgttgtggctttgtttttccttaacgccgtcatttttcttttcatgttaatgaaatatttcactaacaaacaaattttaccaacactcattttaagccttgcatttttaagtggccttatctatttagttgaaaccattgtaattatccataaaccaattaacggcagtacactgatccagacaaagtcgaatgatgtttctattttctatattttccgccaactcagttttatttgtttaacctcgctggcgctcttttgttatggaaaagacaacatccttgacaacaataagaaaaaaacgggaatcctgttgctggcgctgatcccttttttagtttttccccttctggcacacaatctgagcagttataacgctgactattctttgtatgtcgtcgattactgtccggacaaccatactgcgacctggggaatcaactatacaaaaatattggtttgtctgtgggcatttttactgttctttattatcatgcgcacacgattagccagcgaactatggccgttaatagcattattatgtctggcatcgctatgctgcaacttacttctactgactctggatgagtataattatactatctggtatatcagtcgcgggattgaagtttccagtaaactgtttgttgtgtcttttctgatttataacatttttcaggagctgcaactctccagcaaactggcagttcatgatgtgctgaccaatatttataatcggcgctactttttcaacagcgtagagtcattattgtcgcgacctgttgttaaggacttctgtgtcatgctggttgatattaatcagttcaaacgcatcaatgcccaatggggacatcgtgtgggtgataaagtgctggtttcaattgtcgatattatccagcaaagcatccgccccgatgatattttagcgcgactggagggtgaggtgtttggcttgctatttaccgaactcaatagtgcccaggcaaaaatcattgcggaacgtatgcgtaaaaatgtcgaactcctgaccggctttagtaacagatatgatgttcctgaacaaatgaccatcagtattggcacggttttttcaacgggtgacacgcgtaatatctcgcttgtcatgacggaagcagataaagccttacgcgaagcgaaaagcgaggggggcaacaaagtgattattcatcatatttaagtgcaaaaatattcagagccatgctttttgcgtggcttttgcatacaatttattactattacccctaaatttcccctccccagcggcgcagagatgagtataattagcgcccctgtgccaggccgcaatcgaactttatctggttttctcgtttcactaaccgaaggagtgccatttatcatgaaattgcaccatagaatgctccggcattttatcgccgcaagtgtcattgtgctgacatcttccttccttatttttgaacttgtcgccagcgacagagcaatgagtgcctatctgcgctatatcgtgcagaaagcagactcctcctttctttatgataagtatcagaatcagagtattgccgcgcatgtgatgcgcgctctcgctgctgagcagtcggaagtgtcgccagaacagcggcgcgccatctgcgaggcttttgagtctgccaataacacccatggcttaaacctgactgcccataaatacccgggcttacgcggcacactacaaaccgcatccactgactgcgacacaattgtggaagctgcagcactattacccgcttttgatcaggcagtggaaggcaaccgccaccaggatgattacggttcaggtcttgggatggccgaagagaaatttcactattatctcgatctcaatgaccgctatgtctatttttatgagccggttaatgttgaatactttgcgatgaataactggtccttcctgcagtcaggaagtattggcatcgatcgcaaagatattgaaaaggtatttaccgggcgtaccgtattgtcgagcatttaccaggatcagcgtactaaacagaacgtgatgagtttgctgacgccggtatatgtcgcagggcagctaaaagggattgtgctgctggatattaacaaaaacaatctgcggaatatcttttatactcatgaccgccctctcctctggcgttttctcaatgtcacgctaaccgataccgattcggggcgcgacattatcatcaaccagagcgaagataatctgttccagtatgtcagttacgtccatgacttaccgggcggcattcgtgtctcgttatccattgatattctttactttatcacgtcttcgtggaaaagcgttctgttctggattttgacggcgttaattttgctgaatatggtgcggatgcacttccgtttataccaaaatgtgtcgcgagaaaatattagtgatgcgatgactggactgtataatcgcaaaattttaacccctgaactggagcagcggttgcagaaactggtgcaatccggttcttcggtgatgtttattgctattgacatggacaagttaaagcaaataaatgacaccctcggtcatcaggagggggatttagcgattacgttattagctcaggcgattaaacagtcgattcgtaaaagtgattatgccatccgactcggtggcgatgaattctgcatcattcttgtcgattcgacgccgcaaattgcagcacaactgcctgaacgtatcgaaaaacgtctgcaacatatcgcgccgcagaaagagatcggcttctcttccggtatttacgcgatgaaagaaaacgatacgttacatgatgcgtataaagcttccgatgagcgtttatatgtcaataagcagaacaaaaacagccgttcatgataaccttctgtggttgtttgcttgtaatctcaggagcgtgaaatgactgaaatggctaaaggaagcgtgacgcatcagcggttaatcgctttattatcacaagaaggtgctgacttccgcgtcgttacccatgaagcggtaggtaaatgtgaagcggtgtcagaaattcgtggcaccgctctaggccagggtgctaaggcactggtatgtaaagtcaaaggcaatggcgtaaatcaacatgttctggcgatcctcgcagccgatcaacaggccgatctgagccaactcgccagccatataggcggattacgcgcttcgttggccagcccggcggaagtcgatgaactcacaggctgtgtcttcggcgcgatcccccctttcagcttccatccaaaactcaaactggttgccgaccctctactcttcgaacgatttgatgaaatcgccttcaatgcaggcatgctggataaatccgttattttgaaaaccgcggattatttgcgcattgcgcaaccagaactggtcaatttccgccgcactgcgtaactagccggtccgttcgataagaagaacggacaaaaccagtacaacagcaatggcaaaaaacgatgacgtgataatcagtgtctcgacaaacatttgatcgttcatagcatgcccccgggagatagctgttttcacgttattgttagcgtgcacaaatggcagtttgatgacagttcgcctgattttttatgcaaaaaacgtaaagattttctacttccttcctgcagcaagcgtaaagtaagcaggcttattattttttggcaaggaaaccacgatgtttgatgtcactttgctgatcctgctcgggttagctgcgctgggctttatcagtcataacaccactgtcgccgtttcaattctggtgttaatcattgtccgcgtcacaccgttaagcaccttttttccgtggattgaaaaacaggggctaagtatcgggataatcattctgacgattggcgttatggcccccatcgccagcgggacgctaccgccctcaaccttgattcactcgtttctgaactggaaatcactggtggcgattgcagtaggcgtgattgtctcctggctgggtgggcgcggcgtgacgttaatgggcagccagccgcaactggtcgccgggctgctggtaggcactgttttaggcgtagcgctgtttcgcggcgtaccggttgggccgcttattgccgcgggtctggtttcgctgattgtggggaaacagtagttaatctcgcaatatatcggcctggcgtttgccccaggcctttcttaaacatagtaataaaggccgttgttgaatcataccccagcgtatgagcaactttctgtacagtatcgcctttcactaatccctgaagcgccataatcagctgtaactgctgacgccactggcgaaaactcaaccccgtctcttttactatcagtcgggcaagattgcgttcactcatcgcaaaaaagccagcccattgccccaatgccccccactcgacaggccctttcgccatcatctccaccatcgtgcggattttaggatgagaagaaacgggcaggtgcagctgttgttgtggctgctgagggagttcatcaaacaggacctgaattaatctgcgggtcattggctcagcacgctgagtcgtcgtcctgtttgccagggttaaaattaattcccggcataagggcgatattttcaatgtgcaacatgttgtcggcattgtcactgcgctgggttcgataaacagaaaacagagttcagcattagctgttacttgattgctatgttccaccccgcccggtatccaaaccgcatattgtggcggcaccatccacaaagcattttccaccgtacaggtaattgcaccatgtagcgccagtatcagctgtcctttgcggtgctgatgtacaggactggttaactcatccgttccggcgtgaatacaaaatgcgaccgcggcttcatggtgtcggtcgggttcatagccattgagattcaacctgtgcatcattttgtccgaacttagcgataatttgtcattttagcttgattcaacataacaataaaaacggtaaggtacagcctcgtttgtaacaatgagaagcatatgacctgttcaacttcattaagcggcaaaaacaggattgtccttatcgctggcattctgatgattgccacaacattacgcgtcacctttaccggcgcagcaccgttactggatacgattcgttccgcttactcgctgacgacagcgcaaaccggcttattgaccaccctgccattattggcctttgcgctaatctcacctttggctgccccggtagcgcgacgttttggtatggaacgtagcctgtttgccgcgttacttttgatctgtgctggtatcgcaattcgctctctcccttcgccttacttattatttggcggtacagcggtcattggcggtgggattgcattaggcaatgtcttactgccaggattaattaaacgcgatttccctcattccgtcgccagacttaccggcgcatattccctgacaatgggagctgcagcggcactgggatcggctatggtcgtgccgctggctttgaacggttttggctggcaaggcgcgttgctcatgctgatgtgttttcctctgctggctctttttttatggctgccacagtggcgaagtcaacaacatgcaaatttgagtacctcgcgcgccttacatactcggggtatctggcgttcaccgcttgcctggcaggtcacattgtttcttgggatcaactcactggtctattacgtgattattggctggcttccggcgatcctcatcagtcacggctatagcgaagcacaggcgggttcactgcatggtttgctgcaactagccacagcagcacccggtttgctgatcccacttttcttacatcatgtgaaagatcagcgtggtattgcagcgttcgttgccttgatgtgcgcagtgggcgcggttgggctctgctttatgccagcgcacgcgatcacctggactctgcttttcggttttggttccggcgcaacaatgatactggggttgacgttcattggtctgcgggctagttctgcgcatcaggcggcggcactctcggggatggcacaatccgtcgggtatttgttggcagcctgtgggccgccgctgatgggtaaaatacacgatgctaacggtaactggtctgtaccacttatgggtgttgccatactttcactactgatggcgattttcggactttgcgccgggagagacaaagaaattcgctaatatccggtgctatagtgacgtaacaaatcatgcgtgaaagggagaacaaacacgatgaatattcagtgcaaacgcgtttatgatccggctgaacagagcgatggttatcgcatactggtcgaccgcctctggccgcgcggtatcaaaaaaaccgatttagcccttgatgagtgggataaagaaatcacgccgtcaacggaactgcgcaaagcctttcacggcgaagtcgtcgattatgcaacctttcgcgagcaatatcttgcagaactggcgcaacacgagcaagaaggaaagcggctggcggacatcgccaaaaaacagccgctgaccctgctctactcagcaaaaaacaccacgcagaaccatgcgctggtgctggccgactggctacgtagcttgtgattttagtacagcatccggcggttatttttcaccagccggatggtcacgccgccacaatgcccattcatcaatcgtttcaccgcccggtaatttgcaattgttgctgaccccttgcgctgtctgcactggaatgagcgtcccgcccttctgctggcaatagaccgacgccggatttgccataccaatctgcggcggtttaggtgcttctggctgagaaggggttgaacaaccagccaggaccagcaagcaaggcagaacaaaactgataattttcatttattgatctcacatatttatccaagattagagtatcgcggtatcgttttgttttgcagcactatttttattacattcactcaaaacatattacgtcttgtttcatctttgttgatgatgttttatcatgcctgcaaagattaaataatcagcatttacccgccgtatcctggagttgttccgtgtcagatcagattatcgcccgcgtctcgcaatcccttgccaaagaacagtcactggaaagtctggtccgacagcttctggagatgctggaaatggtcactgatatggaatcaacctacctgaccaaagtggatgtcgaagcgcgcctgcagcatattatgtttgcccgtaacagccagaaaatgtacatcccggagaattttaccgtctcgtgggattactcgttatgcaaacgcgccattgatgaaaactgctttttcagcgatgaagtccccgaccgttggggtgactgtattgcggcacgcaatcttggcatcaccacatttctgagcacgccaattcacttaccggatggatcattctatggcacgctttgcgccgccagcagtgagaagcgccagtggagtgaacgcgcggaacaggttttacagttattcgccggactgattgcacaatatattcaaaaagaggcactggttgaacagctgcgcgaagccaatgctgcgctgattgcgcaatcgtataccgactcgttaaccgggctaccgaatcggcgggcgatttttgaaaatctgacgacactgttttccctcgcccggcatcttaaccataagataatgatcgcgtttatcgatctggataacttcaaattaatcaatgatcgttttggtcataatagtggcgatctgtttctcattcaggttggcgagcgccttaatacgctccagcaaaatggcgaagttattggtcgtctcggcggtgatgagtttttagttgtttcactaaacaacgagaatgcggatatttcgtcgctgcgagaacgcattcagcagcaaatacgtggagaatatcacttaggtgatgttgatttgtattatcccggtgccagtcttggcatagtagaagtcgatcctgaaacaaccgatgcagacagtgccctgcatgctgccgatattgcgatgtatcaggagaaaaaacacaaacagaaaacaccttttgtcgcgcatccagcgctacattcctgaggcgtattcacatccttttgattggtgataacatgcgaatcggtattatttttccggttgtaatcttcattacagcggtcgtatttttagcatggttttttattggcggctatgctgccccgggagcataaagatgaaaaaaacaacgattattatgatgggtgtggcgattattgtcgtactcggcactgagctgggatggtggtaacgtcacctctaaaaaatagcaaaggctgcctgtgtgcagcctttgtgcaatttaagcgttaacttttaatcttcctgtagataaatagcacgacaatcgcaccaataacggcaaccacgaagctgccaaaattgaagccatcgactttaccaaagccaaacagcgtgctgatccatccgccgactacggcaccgactatccccagcaggatagtcataaagaatccacctccatctttacctggcatgatccacttcgccagaataccggcaataagcccaaaaataatccatgacagaatgcccattgtttcctcacttatctgttttgcattagcgggttagtcgctgataaaaagcatagcacaacatcgggagggcaagatttgtgacgagcatcacggaggttttttttgcgatggcgcagaaattgcgccatcaacgatcagtgataattaccaaccacaaacatcatgttcgttttccgtgtcataagaacgtacggtattcaccagatcttttatcacttcagccgccacttctggcaccagcaaagtcatcggcgtctctgtttcataatcgacagaaacgccattgctgttattggtgacggtcacggtatacgttgctttgcccatgattcatttcccgttatgaatgactttccgttgttgcgcaccttccatcaggacttcaggagccacgaagaagtcaatgttgaaataagtatcgtcagtcatggcttcaatgttgtgccacttttctggagggaacaccgcaaactgccccgcttcgataaggatcacctgatcaggctctgcactgtgttcatcagcgtagccgagatatttgaccgccccatgcataacggaaaggcgtgggtaaacccccgggcgcgttcctttatcaagatgacgttcgaatattccggcaggtgcagtttgtttattccagaaaggcgttgagcgcgtatgaatataattctgtgggatttgaagcatccttttccctccttcggtgaatgcgctgaaaacggtttattccagccgtttcagggtacgcctgataatttgcattttaaataccatttattggttactttttagcaccatatcagcgaagaatcagggaggattatagatgggaagcccgcgacaacgcgggctgaaagcatcaggattgcagcgtcgccagtcgggcagcgaaacccacgaacatcaaaccaatcagtgagttgccaactttagccagtttctttttggtacgtatgtactgcgtgacaaaagcaccagatataatcaggaagctcaaatagcagaaactcaccagttccagcgtcgccgccagaataaagaatgaaattcccgtatgtggggcattaacatcgataaactgtacgaaaaacgacacatagaacaaaatggctttcggattagtcaggctcaaaattaacgcgcgtttaaaaatagcaccgtattggggctcatcggatttggcctcgctatttttacccttcagggtcgcgtaaagaattttactccccagatagagcaaataaaacgcaccaagataacgtacaatgttgaataatatcggggtggtcttaattaatgtcgccactccagcccatgccagaaacatcaataccgcatcgccaataaatacaccgcaggccgcaagataaccgcctttcataccgctactgacgctatttttgagtacaaacagggtatttggccctggcaccaacacaataaaaatggccccaaccagataggtccagtaattcagaaccccgtattcagcgaacacattaacctctttaattatctttcgatcatgcgcgattaaaggtgaatatgctaaccaatctgtagcggcttagaaaggagaaaatcaggttttaacctgatatcaacccgataattgaatcattaatcaggcatgctccagtgaaaaattcgggtagtgctcggcaaaatactggcgtaaaaattctaccgttatccgcactttcgctgacgtcgccagccttgaaacataaacggcccagacgttcgctggctggtaatattccggtagcacttgcactaaatgaccactggcaatgttttcgctaacatcccaccaggaacgcagagcaatcccctgcccatcgagacaccactgatggacaatttctccatgattagacgacagtgggccggtgactttaatcgcatgggggccttctttattgcgtaattgccagacaccaaaaggatgatcgcgctctttaatgaccaggcacggcaatgcagaaagatcggttaaatgtttcggcgcgccatgttgcgcaataaattccggcgacgcgcagagaatacggtaattggtcgccagtttgcgggcgattaaattaggggcgatgtcatcgccaatgcgaatatcgagatcgacaccttcattgaccaaatcgaccagtcggtcttccacatcaaaacgtaattccagttgcggatacgccttcgccagcgctaataacgccggagccaccacctgtcgtccaaaaccaaagctgctgataatacgcagcatcccctgcggcacctgacgcacgtcagaaagttcgtccatcatctgaccgacatcctgcaaaatccgctgcgcccattcataaatccgctctccttcttcggtaatggtgacgcggcgggtggtgcggtgtaacaacaccacgtttagcgtttgctccagcaaggcgatgcgcttgctgacgaacgccggtgaaacgcccagttcttccgccacggcggcaaaaccagcccggcgagccaccagcataaagacgcgcaaatcattcagcagcggtaaattattcatgattcgtgttttatgtttcaccagttacggggattaattccttttcagtcaattataggatggtgatgttgtcaattttgatggtcaggaagtgagaacccaatgatgaaaacgatgcgtattgctgcgatcccgggagacgggattggcaaagaagtccttcctgaagggattcgcgtgttacaggctgccgctgagcgctggggcttcgccttgagttttgagcaaatggagtgggcgagctgcgagtattacagccatcacggtaaaatgatgccggacgactggcatgagcaacttagccgtttcgacgccatctattttggtgccgtcggctggccggataccgttccggaccatatttcgttgtggggttcgctgctgaaatttcgtcgtgaattcgaccagtacgtcaacctgcgcccggttcgtctctttcctggcgttccctgcccgctggcgggaaaacagcctggcgacatcgatttttacgtggtcagggaaaacaccgaaggcgaatattcctcgctcggcggtagagtgaatgaaggtacagagcatgaagtcgtcattcaggaatcggtatttacccgccgtggtgtcgatcgcattttgcgttatgccttcgaacttgcgcaaagccgtccacgtaagacactaacttctgccactaaatcgaacggtttagccatcagcatgccgtactgggatgagcgagtggaagcaatggccgagaattacccggagatccgctgggacaagcagcatattgatattctctgcgcgcgttttgtgatgcagccggaacgattcgatgtggtggtggcgtccaatttgtttggcgatatcctttccgatcttggcccggcctgcaccggcaccattggcattgccccatccgccaacctgaatccggaacgcactttcccgtcgctcttcgagcctgtccacggttccgcgccggatatctacgggaaaaatattgctaaccctatcgccacgatttgggccggggcaatgatgctcgattttctcggcaatggcgatgagcgtttccagcaagcgcataacggtattctggcagcaattgaagaagtgattgctcacgggccgaaaacacctgatatgaaaggcaatgccaccacgccacaggttgccgacgcgatttgcaaaattattttgcgttaaggtcaaaccagtttatttgaaccgcgtcactgacgcggtttttttattcgttctttgcagtaaataacctgcgtcatttcaccttttattgtttccgtttcgtgttttatggctttccgtattcttaattgtttaatttatgtaacatgcaaattttgttacgcgtacgttaggttccgccgtacaggtattggttttgctggcaatgggactggtgatttatttagccaccagtaaatacggcaatattcgtcttggcgaaggaaaaccggaatacagcacgctctcctggctgtttatgtttatttgtgccggtttaggttcttctacgctttattggggggttgctgaatgggcctattattatcaaacacctggattaaatatcgcaccgcgttcacaacaggcactcgaatttagcgttccctactctttcttccactggggcatcagcgcctgggcaacttatacgctggcctcattaatcatggcttatcactttcatgtgcggaaaaacaaaggtctgagcctttccggcattattgctgctattaccggcgttcgcccgcaaggcccatggggaaaactggtcgatttgatgttcctgatcgccactgtcggcgcactgaccatttcccttgttgttaccgcagcaacctttacccgtgggctttccgcgctgaccggtttacccgataacttcaccgtgcaggcatttgtgatcctgctttccggcggcattttttgcctaagctcgtggattggtatcaacaacggtttgcaacgtctgagcaaaatggttggctggggcgcgttcctgctgccattactggtgctgattgtcggcccaaccgaatttattaccaacagcatcatcaatgccatcggcctgaccacgcaaaacttcctgcaaatgagcttattcaccgatccgcttggcgatggttcatttacccgcaactggaccgttttctactggctgtggtggatctcatacacccctggcgtagcaatgtttgtcacccgcgtttcccgcggtcgtaagattaaagaagttatctggggactgatcctcggcagcaccgtcggttgctggttcttctttggcgtaatggaaagctatgccattcatcagtttatcaatggcgtaatcaacgtcccacaggtgctggaaacactgggcggcgaaacagctgtacagcaagttctgatgtcgttgccagccggtaaattgttcctcgccgcatacctgggcgtgatgattattttccttgcctcgcatatggatgcagtggcctacaccatggcggcgaccagtacgcgtaatctccaggaaggtgacgatcctgaccgtgggctgcgtcttttctggtgcgtggtgatcactctgatcccgctttccatcttgtttaccggtgcttcgctggaaacgatgaaaaccaccgtcgtgctcacagcccttcccttcctcgtcattttactggtgaaagtcggcgggtttattcgctggctgaaacaggattacgccgacattccggctcatcaagttgaacattatctcccgcagacaccggttgaagccctggaaaaaacgccagtgctccctgcgggaaccgtattcaaaggcgacaactgagcgccatcatcctaacgataaaggtatccctatgagcaatctgagccctgactttgtactacccgaaaatttttgcgctaacccgcaagaggcgtggaccattcctgcccgtttttataccgatcagaacgcgtttgaacacgaaaaagagaacgtcttcgccaaaagctggatttgcgtcgctcacagcagcgaactggcgaatgccaatgattatgtgacgcgtgagatcattggcgaaagcatcgtgctggtacgcggtcgtgataaggttttgcgcgcgttctataacgtgtgtccgcaccgtggtcatcagttgttgagcggtgaaggaaaagcaaaaaatgtgattacctgcccgtatcacgcatgggcattcaaactcgatggcaacctggcccatgcacgtaactgcgaaaacgtcgccaatttcgatagcgacaaagcgcaactggttccggtgcgtctggaagaatatgccggattcgtcttcatcaacatggaccccaacgccaccagcgtagaagatcaattacccggcctgggcgcgaaagtgctggaagcctgcccggaagtccacgatctgaaactggcggcccgctttaccacccgcacgcctgccaactggaagaacattgtcgataactatctcgagtgctatcactgtggtccggcgcatccaggtttctccgactccgtacaggttgatcgttactggcacaccatgcacggtaactggacgctgcaatacggtttcgccaaaccgtccgaacagtcgtttaaatttgaagagggtacggatgcggcattccacggtttctggctgtggccgtgcacgatgctgaacgtcaccccgatcaaagggatgatgacggtcatttatgaattcccggtggattctgaaactaccctgcaaaactacgatatttacttcaccaatgaagagttaaccgacgagcaaaaatcgctgattgagtggtatcgcgatgtgttccgtccggaagatttacgtctggttgaaagcgtacagaaagggctgaaatcgcgtggctatcgtggtcaggggcgcatcatggccgacagtagcggtagtggcatttccgaacatggtatcgcccatttccataatctgctggcgcaggtgtttaaggactaatgacatcggcggcggtattttccgccgctgggctgatttttgatggagtacagcaatgtcagactatcaaatgtttgaagtacaggtgagccaggttgaaccccttaccgaacaggtgaaacgcttcacgctggtggcaaccgatggcaaaccattacctgcgtttaccggaggaagtcacgtcattgtgcagatgagcgatggtgataaccagtacagcaatgcgtattcactactgagttcgccgcatgacacctcttgttatcagattgccgttcggctggaggaaaactcgcgcggcggttcccgctttttgcatcagcaggtaaaagtgggcgatcggttaacgatttcaacgcctaataacctgtttgcgctaattccctcagccagaaagcatctgtttatcgcgggcggtattggtatcacccctttcctgtcgcacatggcagagctgcaacacagcgacgtcgactggcagctacattactgctcgcgaaatccagaaagttgcgcatttcgtgatgagctagtccagcatccgcaggctgagaaagtccatttgcatcattcatcaaccggaacacgactggaattagcgcgattattggcggatatcgaacctggcacacacgtttatacctgtggccccgaggcgctaattgaagcggtaagaagtgaagctgcgcgtctggacatcgccgccgatacgctgcactttgagcaatttgctatcgaagacaaaaccggcgatgcatttaccctggtgcttgcccgttccggaaaagagtttgtggtgccggaagagatgactattttgcaggttattgaaaataataaagccgcgaaagtggaatgtttatgtcgtgaaggggtatgcggaacctgcgaaacagcaatactggaaggtgaagctgaccatcgggatcaatattttagcgatgaagagcgtgccagccagcaaagtatgttgatctgttgttcgcgtgcgaagggtaaacgcctggtgttggatttgtagtttgccgaagccggatgtggcgctgagcgcgcccagtccggcttcggaagattttactgcggatattcctgcaataaattgtgtaatgcttccgccatcagctcaccacgccagccggaaatcagctccggcaaattgttctgcggtttcagtttccagtgccagttcagcagttggttgatttgccgacgcgatgccagcaattcggcgctgatcttatgcgtttcgctcacgtcagtaatcagcgacttaatcgctttaaacgctttacgataacccggcatgtccatcaggttaagcatcggctgcggtaaggcatcttccggcaatgtctgcgctttttccaccagcgctagcagcgttttaccgtgaaagcggatttcgctaccggataaacccaggctgtccagttcgcctaaacttcccggcatataacgcgctaccgaccacaaatgctcttcacgcacgacaaagttcaccgccagatcgcgctctcgcgccttgcgcagtcgccagtcggctaacagttgcagacaggccagttggcgtgtgcgtaattgccaggcattggtgatatcacgccaggcatcttccggcgcaacgacttcctgacgacgcatttgcatcaggcggcattcatccagcgccgcaggtagccagccggaggcctccgtttctaccataagcttggcggtgatcggtaacagataccagacatccgccgctgcgtattcacactgacgttcggtcagcggtctggccagccagtcggtgcgcgattcactcttgtccagcgtaacgccggaatactcttccaccatggaagcgaaaccccatgacatcgggcgtccgcagaaggcagcaaggatttgcgtgtcaatcaagggttgtggtaattcgccaaagacattgaggaacacttccagatcttcactgcctgcatggagaaattttgtgatggacggatcgcgcaggatcgctttcagcggtgaccagtcggtgatcccgagtggatcgattagcgccagatgctcgccatcgaaaagttgaatcaaccccagctgcgggtaataagtgcgcgtacgaacaaattcagtatccagggctatcgccggaaaggcacggacggcttcacacaaagaagccagcgcatcgtccgtggtaatcatttggtaattcaaattgttttctctttagtgggcgtcaaaaaaaacgccggattaaccggcgtctgacgactgacttaacgctcaggctttattgtccactttgccgcgcgcttcgtcacgtaattctcgtcgcaaaatttttccgacgttagatttcggtaactcatcacgaaactccaccagcttcggtactttgtatcccgtgagctgacggcggcaaaaagtcaccagtgactcttcggtaagcgatggatcttttttcactacgaagattttcaccgcttcaccactggagccggaaggtacgccaacagccgcgacttcctgtacgccaggatgctgcatgacgacatcttcaatctcgttgggatagacgttaaaaccggaaaccagaatcatgtcttttttacgatcgacaatgcgcaggaatccttcttcatccattaccgcgatgtcgccggtgtgtaaccagccatttttgatgatttcatcggtagcatcgggacgctgccagtaacccagcatcacctgcggtcctttgacacaaagctcacccggttgacctggtggtacttcattatcatcatcatccaccagtttggcttccgtcgacggcaccggcaaaccgatgctaccactatgataatcaatatcatatgggttaacgctgaccagcggcgcacactcggtaaggccatagccttccagcagatactgtccggtcagtttcacccaacgctctgccaccacttgctgcactggcatcccaccgcctgcggaaagatgcagactggagaaatccagctgctggaactctttattgttcagcaacgcattgaacaaggtgttaacgcccgtgatagcggtaaacggatatttcgctaactcttttaccaaccctggaatatcgcgcgggttagtgataagcaggttctgcccacccagttcgataaacagcaggcagttaatggtcagggcaaaaatgtgatacagcggcagcgccgtcaccaccagctctttgcccggatgcaacagcggaccataggtcgcgttaacctgttccaggttcgccagcatattgcggtgagtcagcatcgcgcctttcgccacaccagtggtgccgccggtgtattgcagaaaagctaaatcttccggcaccagttcgggtttgacgtactgcatccggtagccgttatgcagtgcgctacgaaatgaaatggcatctggcagatggtatttcggcaccaaacgcttgatgtatttaacaacgaaattgactaccgtgccttttgccgtagatagctgatcgcccatacgggtcagaattacgtgctgaacggcggttttatcaaccactttttccagtgtgtgagcaaagttagacacgataacaatcgccgatgcgccgctatcgttaagctgatgctcaagctcacgcggggtatacaacgggttaacgtttacgacgatcatcccggcacgcaaaatgccaaacagcgccaccggatattgcaataaattaggcatcatcaacgcaacgcgatcgcctttcttcagccccaacccttgttgcaaataagcggcaaacgcgcgactgcgttcttccagcttgcggaaggtcattacctcccccatattcacaaacgcaggttgatcggcgtagcgcgcgaccgactgctcaaacatatctaccagagattgataacggtcagggttgatctccgtcggaacgtccgcgggataacggttaagccaaaccttcttcaattcttcacctctaaaatgcgtgttcgtcgtcatcgcaaccccaaatgatatacatgccgttaacataatattaactcatcataccagcttgataattacccaacgaaaaggttgcgaagcgcgtcactatttatttttatctttaccgtaagaatgcagaaacagcggaccagccgctgtttctttttctttaaaaacaagcaattattcagttacaactgtttgtactctcgcggggccgggattataccagccccatccgccgtagccatagggccagccacgaccgccataaaaccatggatcaatcggctgaggcggcataatcacctgctgggttaaatgccaacgtttgtaacccgttacttgcatcaccataaatttatagggcgtattgccgattttgccgtcaaccgcaccagtgattggcccgactaccgtaaccagttgtccacggaaatccaccgggtccagaaaaccgttcacatcggcataaatgcgaccgcgagaaggttctcccagcgtcggtctggctccgctgtccagcggtacggtagcaatttccaggcgagttttcccttgctggttttgtaccgcaaccactttgccaccaaagcgtgcctcctgaccaacgtacagctgcggcgcactcatcacccgaactaaatcttgttgcggcgtgggactgctgcctttaatggcgtccggcacagtgacacaaccgctcagcattagcgcaaacgtacctgccagtatgcctttgataacattcttttgaaccgccatggtgcgactcctttttttctcagggcatactcttaagattcattctttgcccggaagtttcttccatgcgacgttgttacgtaaataaaccggttcggcatgttccaccgccaccgttttaccctcagcaaacatctgacacgcaatcggcagcatatcttcagcagcaggcagtaacacttcgccatcgcgcaaaaccagcccgctctctttaccgagatccggccaagcttgccagcccgtccctaccgtcacccattcgccggaaagctgttgcattcgttcatggacgatttcgggtttgagtacggcttcggtttcttcaccgtgccagataccgttttcatcacgctgatattcggcccagtaaacttcgcccattcgcgcgtcaatggctgccagcacgcgggttgcgccgtttttgcgccacgccccttgcgccatcgtcattagcgtggagacgccaatcatcggtaattccgcgccaagcgccagcccttgcgcgatgccaataccaatgcgcacgccagtaaagctaccggggccgcgcccgtaagccagagcgttaatatcagtcagggaagttccgctggtggtcaggatatcctgcaccatcggtaagattcgttgagtatgttcacgagggcaaagctcaaaatgagcgttgacagtaccgtcgttccacagggcgacagagcaggcctctgtcgcggtatcgatagccagaattcgcatgggtcttcgtgcttagatcaataaaaaggcgcgcatcataccatactccgtaacaaattacctggaggatggtatcgcaaggaaacgaaccgcacgggcaatgtcacgggtgcgtggcgcgggcggcagactggcgagaaacgtcgcgccgtaaggacgcatcaccagccgattgtcacaaatcaccagcacgccacgatcgtcggcgtcgcgaatcagtcgccctaccccctgtttgagagtaatgacggcatctggtagttgcacttcatcgaacgggtcgccaccgcgcaaacgacaatcttccatgcgcgcttttaacagtggatcatccggcgaggtaaacggcaatttgtcgataattaccaatgacaatgtatcgccacgcacgtccaccccttcccagaaactgctggttgccacaagaagcgcattaccggcgctgacaaattgctgcaacagttgccctttgctggtttccccctgcaacaatacaggaagcgtcatggtagcgcggaactgctcggccagatcgcgcatcatggcgtgcgaggtacaaagcataaaacaacgaccgttgttagcttcgatgatcggtcgcagcattgccgctaactggcgagcagaacctggctggttggtttgcggcagattgcgcagcacacagagtaacgcctggcggctgtaatcaaatgggctgggcaacagcaacgactcggcctgttcgatgccaagccgcgaggtgaaatgatgcagatcgtcgttcaccgacagcgttgctgaggtgaagatccagctaccgggtttttgcgccattaactctttgaatttatccgccacgctgagcggcgtgagagccagagtaaaatggcgcgaagtgcattcgtaccagtagctgtagcccggctgattgatctcttttagccgcttcagccgtgtgcgatacaacgtggcgcgctcaaatgccgcatccagcaaggcggaacgccccagtgacagtttcgccacgtcataacaaagttccagggtgtcatcgagcagtaaaaatgcccgctgaatttgcggattagctaacagctcacgcaggttaccgcgataacctggctcaccgagttgcagacgaaaatcctgcgcactctgggcaagacgatcagcgcacttttgtaactgctgggtgtcttttaattcggtgcggtaggcgatggtgatgtcttttgccaggtcgagcagttgtcgactggagagtgactgaccaaaatactggctggcaatgtccggtagctggtgggcttcgtcgaagatcatgacgtccgcttccgggatcagttcgccaaatccactctctttaaccaccatatccgccagaaagagatgatggtttaccaccaccacatcggcgtccatcgcttttttacgtgctttgaccacaaagcaatctttatacatcgggcagtcgctgccaagacagttgtcgttggtgctggtgaccagcggccacgcctgtgaatcttccgccacgctgacgcaggtgctgatatcaccatcgactgtttgattagaccaggagcgcagcaggatcacatcgcttaagatttgtaccggcagatcgccccccgccagcgcctgctgttcgagacgttcgaggcagaggtagtttgagcgccctttcagcagcgccacgttgcccgtatatttcaatgcctttgagactgttggcaaatcgcggctgtagagctgatcctgcaacgcttttgagccggtcgagataatgactttctttttcgcccgcagcgcaggagccaggtaagcgtaggttttgcccgtaccggttcctgcttccaccaccagcggctggcctttttctatcgcctgggtgacggctaccgccatctgtcgctgtggttctcgcggcttaaagcctggtatcgctttcgccagctgaccgtctggtgcaaaatcgtccgtcacactaccccctgttgatttgaacagggattatgtcaggatgagggcgctttcgccagttgaagtggtgacggcgacctcacattgtggcagtctttgcagcacgaaaatggaagtataatgaggacaaaatgatgactatcgttcgtatcgatgctgaagcccgctggtctgatgtagtaatccacaacaacacgctctactacactggtgtaccggaaaacctcgacgccgatgcctttgagcaaaccgccaacacgctggcacagattgacgccgtgctggaaaaacagggcagcaataaatcgagcattctggatgccaccattttcctggccgataaaaacgacttcgcggcgatgaataaagcgtgggatgcttgggttgtcgcgggtcatgcgccggtgcgctgcacggtacaagcgggtttgatgaacccgaagtataaagttgaaattaagattgtggctgcggtgtaagctttatcgaagcaaaataagtcagacgataatttatcgataatactggtcggttttacataaatcgaccagagaataagatattactgttgatgcttctgctaattcattatttatatttataatttcaattttatctataaaactaactatataaataaacataaacatgccgttgtgttcgccctttgattagcaactctggttttctttcttagctgaacaatctggttatagcgtgcggactgaccgttaaatttctccatcttactggataacacaccatgagctgctacctttaaaacacctgaatgtcaacaggttaactcgtgccatatcgttataatccctttgatattagatgcaaattaaggtcatatatagccttatcgataacatggttaattttaaggataagaatatgcctgctgtaatagataaagccctggatttcattggtgccatggatgtatcagcgccaacaccaagttcgatgaatgaaagcacggcgaagggaatctttaaatatttaaaagaactgggagtacccgcgagtgccgctgatattacggcgcgagctgaccaggaaggctggaaccctgggttcacggaaaaaatggttggatgggcaaaaaaaatggagacaggtgaacgttctgtgattaaaaatcctgaatacttttcaacatatatgcaggaagaactaaaagcactggtctgagttaaatttatatcagcataaatgggtcaggacgcttttaatcacatataaaaagcgtcctttttctcacaatcaaatgatcatcggcttctataacgaaatcgatacggattagtgtgttactcgtcttcatcctcaaaacgcgccacgattcgctcgccggagtggttggcacgcagctcttctgccaccagcgcgattgcctggccgctgctcatcccttgtgccatcagttcctggatccgctcgacagctttttgctgctgttcatgggtgagtgaaggtaaacctgcaaacattgttaactcctgctaaattgttggcgctaattatttcatgctacccggcacatagccagtagagtcaggactgatgaagacgttatctcccgctgtgattactttactctggcgtcaggacgccgctgaattttatttctcccgcttaagccacctgccgtgggcgatgcttttacactccggctatgccgatcatccgtatagccgctttgatattgtggtcgccgagccgatttgcactttaaccactttcggtaaagaaaccgttgttagtgaaagcgaaaaacgcacaacgaccactgatgacccgctacaggtgctccagcaggtgctggatcgcgcagacattcgcccaacgcataacgaagatttgccatttcagggcggcgcactggggttgtttggctacgatctgggccgccgttttgagtcactgccagaaattgcggaacaagatatcgttctgccggatatggcagtgggtatctacgattgggcgctcattgtcgaccaccagcgtcatacagtttctttgctgagtcataatgatgtcaatgcccgtcgggcctggctggaaagccagcaattctcgccgcaggaagatttcacgctcacttccgactggcaatccaatatgacccgcgagcagtacggcgaaaaatttcgccaggtacaggaatatctgcacagcggtgattgctatcaggtgaatctcgcccaacgttttcatgcgacctattctggcgatgaatggcaggcattccttcagcttaatcaggccaaccgcgcgccatttagcgcttttttacgtcttgaacagggtgcaattttaagcctttcgccagagcggtttattctttgtgataatagtgaaatccagacccgcccgattaaaggcacgctaccacgcctgcccgatcctcaggaagatagcaaacaagcagtaaaactggcgaactcagcgaaagatcgtgccgaaaatctgatgattgtcgatttaatgcgtaatgatatcggtcgtgttgccgtagcaggttcggtaaaagtaccagagctgttcgtggtggaacccttccctgccgtgcatcatctggtcagcaccataacggcgcaactaccagaacagttacacgccagcgatctgctgcgcgcagcttttcctggtggctcaataaccggggctccgaaagtacgggctatggaaattatcgacgaactggaaccgcagcgacgcaatgcctggtgcggcagcattggctatttgagcttttgcggcaacatggataccagtattactatccgcacgctgactgccattaacggacaaattttctgctctgcgggcggtggaattgtcgccgatagccaggaagaagcggaatatcaggaaacttttgataaagttaatcgtatcctgaagcaactggagaagtaagacgtggaataccgtagcctgacgcttgatgattttttatcgcgctttcaacttttgcgcccgcaaattaaccgggaaaccctaaatcatcgtcaggctgctgtgttaatccccatcgtccgtcgaccgcaaccggggttgttgctgactcagcgttcgattcatctgcgtaaacacgctggacaagtggcattccctggaggtgcagtcgatgacacggacgcatcagctatcgccgccgcgctgcgcgaagctgaagaagaggtcgctataccgccttccgccgttgaagttatcggcgtgctgccgcccgtcgatagcgtcactggctaccaggtaaccccagtggtcggcattatcccgcccgatctgccgtatcgcgccagtgaagatgaagtctcggcggtgtttgaaatgccgctcgcccaggcattacatctgggtcgttatcaccctttagatatctaccgccgtggtgattcacatcgggtatggctgtcctggtacgaacagtattttgtatggggaatgaccgcaggcataattcgtgagctggcgctgcaaattggtgtgaaaccctgactatacttatctttacatctacaaaacactacttgagacaatcatcgcaatattagttaaatcgcggtttttgattagtttaattcatgtgaatagttaagccagtcgccgcgttccctcttacactatgcgctgttattagttcgttactggaagtccagtcaccttgtcaggagtattatcgtgattagtctattcgacatgtttaaggtggggattggtccctcatcttcccataccgtagggcctatgaaggcaggtaaacagttcgtcgatgatctggtcgaaaaaggcttactggatagcgttactcgcgttgccgtggacgtttatggttcactgtcgctgacgggtaaaggccaccacaccgatatcgccattattatgggtcttgcaggtaacgaacctgccaccgtggatatcgacagtattcccggttttattcgcgacgtagaagagcgcgaacgtctgctgctggcacagggacggcatgaagtggatttcccgcgcgacaacgggatgcgttttcataacggcaacctgccgctgcatgaaaacggtatgcaaatccacgcctataacggcgatgaagtcgtctacagcaaaacttattattccatcggcggcggttttatcgtcgatgaagaacactttggtcaggatgctgccaacgaagtaagcgtgccgtatccgttcaaatctgccaccgaactgctcgcgtactgtaatgaaaccggctattcgctgtctggtctcgctatgcagaacgaactggcgctgcacagcaagaaagagatcgacgagtatttcgcgcatgtctggcaaaccatgcaggcatgtatcgatcgcgggatgaacaccgaaggtgtactgccaggcccgctgcgcgtgccacgtcgtgcgtctgccctgcgccggatgctggtttccagcgataaactgtctaacgatccgatgaatgtcattgactgggtaaacatgtttgcgctggcagttaacgaagaaaacgccgccggtggtcgtgtggtaactgcgccaaccaacggtgcctgcggtatcgttccggcagtgctggcttactatgaccactttattgaatcggtcagcccggacatctatacccgttactttatggcagcgggcgcgattggtgcattgtataaaatgaacgcctctatttccggtgcggaagttggttgccagggcgaagtgggtgttgcctgttcaatggctgctgcgggtcttgcagaactgctgggcggtagcccggaacaggtttgcgtggcggcggaaattggcatggaacacaaccttggtttaacctgcgacccggttgcagggcaggttcaggtgccgtgcattgagcgtaatgccattgcctctgtgaaggcgattaacgccgcgcggatggctctgcgccgcaccagtgcaccgcgcgtctcgctggataaggtcatcgaaacgatgtacgaaaccggtaaggacatgaacgccaaataccgcgaaacctcacgcggtggtctggcaatcaaagtccagtgtgactaatacttcttactcgcccatctgcaacggatgggcgaatttatacccgctttctcgtctgctgtaatattccccactacacttccactgttgcgtcaggcgtttgtcgccatacgcttacagggtggcccgcatgcaaaaagcacaacggatcattaaaacctatcgtcgtaatcgaatgattgtttgtacgatttgcgcactcgttacgctcgcttcgaccctgagcgtgcgatttatttcacagcgtaacttaaatcaacaacgggtagtacaattcgccaatcacgctgtagaggaattagataaagtactgcttcccctacaggcaggtagcgaagtcttgcttccgctgattggtctgccctgctctgtcgcccatttgccattacgtaaacaggcggcaaaactccaaactgtgcgatccattggcctggtgcaagacggcacactttattgctccagcatttttggttatcgcaatgtgcccgtcgtggacattctggctgaacttcctgcaccgcaaccacttttacgcctgacgatcgaccgtgccctgattaaaggcagtccggttttgattcaatggacgcctgcagcgggcagtagcaatgctggggtcatggagatgattaacatcgacttactgacggcaatgctgcttgagccacaactgccgcaaatcagtagcgccagcctgacggtggacaaacggcatttgctctatggtaatgggctggtagattcccttccgcaacctgaagacaatgaaaactatcaggtttcttcgcaacgctttccttttaccattaacgttaatggtccgggggctacggcgctggcatggcactatcttccaacacaattaccgctggcggtgctgctaagtttactggtgggctacatcgcctggctggcgaccgcttaccgaatgagcttttcccgcgaaatcaatctgggcctggcgcaacatgagttcgaattgttctgtcagcctttgcttaatgcgcgcagccagcaatgtattggtgtagagattttgctgcgctggaacaatccgcgtcagggctggatttcaccggatgtgtttattcctatcgcggaagaacatcatttaattgtgccactgacccgctatgtgatggcagaaaccattcgtcagcgccatgttttcccgatgagtagtcagtttcatgttggcattaacgtcgcacccagccattttcgccgtggtgtgctgataaaagatctcaatcagtactggtttagcgctcacccgattcagcaactgatcctcgaaatcaccgaacgcgatgccttactggatgttgattatcggattgcccgcgagctgcatcgtaaaaacgtcaaactggcgattgatgacttcggcaccggcaacagctcgttttcctggcttgaaacattacgtcctgacgtgctgaaaattgataagtcatttaccgcagctataggttctgacgcggttaactcgacggtgaccgatatcatcatcgcgctggggcaaagactgaatattgaactggtggcggagggcgtggaaacgcaagaacaggcgaagtatttgcgccgtcatggcgtgcatattttgcaagggtatttgtacgcacagccgatgccgctacgtgattttcccaaatggctggcgggcagccaaccgccgcccgcccggcataatggacatatcacgcccattatgccgttacgttaacgcttactcatcttcatcgtgcgccggttgctctttaacaatgcgaaccagatcaacacgataatcattggcttcaatgatggtgatatgcagtggccctacatcaatcacatcgcccacacggggaatgtgaccatttgccgagatcacgaggcccgcgaccgtcgcgatatcatcgtcatcggcaaggtgctcaacatcaagcgcctgctgcaaggcatgcaaatctgtaccgccttttaccagccagccgtcaccatcagtaatgatttccggcgtttcgtcagcgtccgggaattcacccgcaatggcttccagcacatccagcggcgtgaccagaccttgtaccacaccaaactcgttggtcacgataacaaagctcccgcgagcacgacgcagcacgcccaacaggttgatcggatcgagggtttccgggacgataatcgccggagacgccgaagcaatcgccgccacatcaacgccctcttccagcgccaccagcagttctttagcacgtacaataccgatgatttcatccagttcaccgcgacataccgggaacagactgtgcggtgaagagagcagttgctcgcggatttcatcgaccccgagattagcgtcaacccagcttatttcaccgcgcggcgtcatgatcccgcgcagagaacgcgacgccagcgtcagtacgccgttaatcatgtaacgttcttcttcggcaaatgcaccttccgggatcggcatcggcatcgggttatcggcatcgtgctgaacattggcctgacgtttcccgcccatcaaacgcaggatggcatcggcagtacgcgctcgcagcggcaaagtcgactggtggcgaataaagttgcgacgcgcaatctggttaaacacttcgatgatgatcgagaagccaatcgcggcatacaggtaacctttcggaatgtggaaaccgaaaccttctgccaccagactcagaccaatcattaacaggaagctcagacagagcaccaccaccgtggggtgctggttaacgaatcgcgtcagcggtttggatgccagcaacataaccgccatcgcaatcactaccgccgccatcatcaccggcagatggttaaccatccctactgcagtaattaccgcatccaacgagaagacggcgtcaaggatgacaatctgtgtgacgaccacccagaaactggcgtagcctttaccgtggccggaatcatgatcgcggttttccagccgttcatgcagttcggttgttgctttgaacagcaagaatatccccccgaacaacataatcaggtcgcgtccggagaaggagaaatccatgacggtaaatagcggtttggtcagcgtgaccatccatgaaatcagcgacagcagccccagacgcataatcagcgccagtgataaccccagcaaacgcgctttatcgcgttgttttggcggcagtttgtcagcaagaatggcgatgaagaccaggttatcgatacccagcacaatttcgagaacaacaagcgtgagtagccccgcccaaattgaggggtccattaagaattccatgacaagctcctgcttaaggaatagctattcgacgccagaaataatgcaggcgtaacgacaaaatgcaaacgaaaggtgcggcatagagtgccagaaaggcaggcgttaaaaggcctgatgctgaaatgacgtcggtgacgatccatactgcgggctactgccctatactccatggttgttaaacgggagttaaacatatcagagacgcctctgatttggcaaagatttaccttcctttgcaaacgaatgtgacaaggatattttacctttcgaaatttctgctaatcgaaagttaaattacggatcttcatcacataaaataattttttcgatatctaaaataaatcgcgaaacgcaggggtttttggttgtagcccttatctgaatcgattcgattgtggacgacgattcaaaaatacatctggcacgttgaggtgttaacgataataaaggaggtagcaagtgaccattgctattgttataggcacacatggttgggctgcagagcagttgcttaaaacggcagaaatgctgttaggcgagcaggaaaacgtcggctggatcgatttcgttccaggtgaaaatgccgaaacgctgattgaaaagtacaacgctcagttggcaaaactcgacaccactaaaggcgtgctgtttctcgttgatacatggggaggcagcccgttcaatgctgccagccgcattgtcgtcgacaaagagcattatgaagtcattgcaggcgttaacattccaatgctcgtggaaacgttaatggcccgtgatgatgacccaagctttgatgaactggtggcactggcagtagaaacaggccgtgaaggcgtgaaagcactgaaagccaaaccggttgaaaaagccgcgccagcacccgctgccgcagcaccaaaagcggctccaactccggcaaaaccaatggggccaaacgactacatggttattggccttgcgcgtatcgacgaccgtctgattcacggtcaggtcgccacccgctggaccaaagaaaccaatgtctcccgtattattgttgttagtgatgaagtggctgcggataccgttcgtaagacactgctcacccaggttgcacctccgggcgtaacagcacacgtagttgatgttgccaaaatgattcgcgtctacaacaacccgaaatatgctggcgaacgcgtaatgctgttatttaccaacccaacagatgtagagcgtctcgttgaaggcggcgtgaaaatcacctctgttaacgtcggtggtatggcattccgtcagggtaaaacccaggtgaataacgcggtttcggttgatgaaaaagatatcgaggcgttcaagaaactgaatgcgcgcggtattgagctggaagtccgtaaggtttccaccgatccgaaactgaaaatgatggatctgatcagcaaaatcgataagtaacgtattgtgttgattatcactcagttttcacacttaagtcttacgtaaacaggagaagtacaatggagattaccactcttcaaattgtgctggtatttatcgtagcctgtatcgcaggtatgggatcaatcctcgatgaatttcagtttcaccgtccgctaatcgcgtgtaccctggtgggtatcgttcttggggatatgaaaaccggtattattatcggtggtacgctggaaatgatcgcgctgggctggatgaacatcggtgctgcagttgcgcctgacgccgctctggcttctatcatttctaccattctggttatcgcaggtcatcagagcattggtgcaggtatcgcactggcaatccctctggccgctgcgggccaggtactgaccatcatcgttcgtactattaccgttgctttccagcacgctgcggataaggctgctgataacggcaacctgacagcgatttcctggatccacgtttcttctctgttcctgcaagcaatgcgtgtggctattccggccgtcatcgttgcgctgtctgttggtaccagcgaagtacagaacatgctgaatgcgattccggaagtggtgaccaatggtctgaatatcgccggtggcatgatcgtggtggttggttatgcgatggttatcaacatgatgcgtgctggctacctgatgccgttcttctacctcggcttcgtaaccgcagcattcaccaactttaacctggttgctctgggtgtgattggtactgttatggcagtgctctacatccaacttagcccgaaatacaaccgcgtagccggtgcgcctgctcaggcagctggtaacaacgatctcgataacgaactggactaacaggtgagcgaaatggttgatacaactcaaactaccaccgagaaaaaactcactcaaagtgatattcgtggcgtcttcctgcgttctaacctcttccagggttcatggaacttcgaacgtatgcaggcactgggtttctgcttctctatggtaccggcaattcgtcgcctctaccctgagaacaacgaagctcgtaaacaagctattcgccgtcacctggagttctttaacacccagccgttcgtggctgcgccgattctcggcgtaaccctggcgctggaagaacagcgtgctaatggcgcagagatcgacgacggtgctatcaacggtatcaaagtcggtttgatggggccactggctggtgtaggcgacccgatcttctggggaaccgtacgtccggtatttgcagcactgggtgccggtatcgcgatgagcggcagcctgttaggtccgctgctgttcttcatcctgtttaacctggtgcgtctggcaacccgttactacggcgtagcgtatggttactccaaaggtatcgatatcgttaaagatatgggtggtggcttcctgcaaaaactgacggaaggggcgtctatcctcggcctgtttgtcatgggggcattggttaacaagtggacacatgtcaacatcccgctggttgtctctcgcattactgaccagacgggcaaagaacacgttactactgtccagactattctggaccagttaatgccaggcctggtaccactgctgctgacctttgcttgtatgtggctactgcgcaaaaaagttaacccgctgtggatcatcgttggcttcttcgtcatcggtatcgctggttacgcttgcggcctgctgggactgtaagactgttgtacactaccggggccttttggccccgtttttttatctggaggattaatgacaatcacggacctggtactgattcttttcatcgccgcactcctggccttcgcgatctacgatcagttcatcatgccccgccgtaacggccccaccctgctggcaattcctttgctccggcgtggtcgcatcgatagcgttatcttcgtcggattgattgtcattcttatctataacaacgtcacgaatcatggtgcgttaataacgacatggttattaagcgcactggctctgatgggtttttatatattctggatccgcgttccgaagatcatctttaaacaaaaaggttttttcttcgccaatgtctggattgaatatagccgaatcaaagcgatgaacttgtcggaagatggcgtgttggtgatgcaattagaacagcgtcggctgttaatccgcgttcgaaatatcgacgatctggaaaaaatttataagcttctcgtttcaactcaataagttatgaatttagccaaagctatgtttagtgtatttttaataatcagacatagcttaggctatattacctcttcccttatttgttatttattttaacgtttcattgatatataaatccaaatgaaaatcgttatcaataaagcaatgaaataatatattccaacagttgttttatattctcaaaatatgttaaggttgcgccctcatttggggagtagccgatttccagattccggaaatgtacgtgtcaacatactcgttgcaaaacgtggcacgtacggactgaatactttcagtcaggcgagaccatatgcacatcaatcgctatgcctgcatgaacgcgaaaaccatcacggcttgttgttcatgtatgcatgtttgctgggggcgatgatgtgttttatggataccccggtcaggacattgtcatgaatatcactgctactgttcttcttgcgtttggtatgtcgatggatgcatttgctgcatcaatcggtaaaggtgccaccctccataaaccgaaattttctgaagcattgcgaaccggccttatttttggtgccgtcgaaaccctgacgccgctgatcggctggggaatgggcatgttagccagccggtttgtccttgaatggaaccactggattgcgtttgtgctgctgatattcctcggcgggcgaatgattattgagggttttcgtggcgcagatgatgaagatgaagagccgcgccgtcgacacggtttctggctactggtaaccaccgcgattgccaccagcctggatgccatggctgtgggtgttggtcttgctttcctgcaggtcaacattatcgcgaccgcattggccattggttgtgcaaccttgattatgtcaacattagggatgatggttggtcgctttatcggctcaattattgggaaaaaagcggaaattctcggcgggctggtgctgatcggcatcggcgtccagatcctctggacgcacttccacggttaataagaacgctgccagaggtgaatattaaagtccgtctggcagtcgaacacttcttttgctgccagtgtttgccagacttctggcttcgcacgccaggcaaacggcgtcatctgcaataatgcgacggcttcatcaccgcgaagacgcatcggataacacaactccgcactctgctgtaatgtaaaaccttccagttgttctgcatgaggtgcatgaagatgtacttcattgtaaatcagccccttcagctccatcaaatgtcgcggtcccggcgtggcagtaatgacccagccgccgggcttcactactcgtgctaattcttctgctttacacggcgcgtaaatacgtattatggcgtccatactggtatcggaaaacggcaaacggtggctggaagcgacacaaaaagtgacctgcggatagcgtttcgccgccgcttttatcgctaccttcgaaacatccagaccaaacgtggtgatttcgggcaacgcatcggcaaatgcgtgtgtgtaatacccttcaccacagccaatatccagcaccgccgtggccttatcatcaagccgttccctcagttgggcgacaattgcatcacgcagcggctgataatgtccggcatctaagaatgcgcggcgtgcttgcatcatttccgcgctgtcgcccggatcacgagaccgtttatgctgaacgggcagcagattgacatacccttctttcgccatatcaaactgatgtcgctggggacagatatagctgtttttttcacgcgaaagaggctgatggcaaagtggacaggaaaaagacatgacaactccggcaggatactaaaggccgcaagtgtaacgcgaatcacgcggcgggcaaatatccgaacgccaggagcgaagataaagcatagtaaaaagcctcgcattcgacgaggctttatagcgagattgaagcgtattcacacttcagatcagtggattcgatcagatagctgttacgttaacagctgccggacctttctggccgtcctgaatttcgaactcaacgttctgaccttcagccagagttttgaagccattaccctggatagcggagaagtgtacgaacacatctttgctgccatcagccggagtaatgaagccaaaacctttagactcgttgaaccacttaacctgacctttaatctttgccatttgaaaaattccttagattgttttcttcgcccgcaggcataacatagataaaactgacacattactgcatgaggcaccaatataaggctcggcagagaagcggtattcaacgtcaacgtgtttactcaggacttctttactgaaaatgccacacataaacagaactgtacctcgtttaacccgaaatctgttatcacatacaacgttaattatggcaagccatttttaaacatgtctcgatcagacgcacaaatctcgatacgtcttccactttttttgcacacttatgcaacggaatacgcgccgatatatcattgtgcttaaccttgccagttcaggcagatacttaaactggcgtattttctaacatagttcaataagttcagttgttccaggccagtgggagaagttattacatagtgcgtgcaatatcacattttttgctatgcaatgaataaaaagttatatcactttttctcataaaacagtcagttaacggctattaattaccctaaagagaagtcaatccccaaagggattgtaaatttaaaataagaaaaattgatgaatgagcaaaaaaatcaagagagaaacgtttcgctaataaataataccacgcttaatcacaaatccgatgtaaacatcctaataaattaatggggtaaatatctttttctgatatcccgttacgcaaataaataatatgataattatttgaagtcagaccagagttttaatttgaagcagttgcaccatgacagtgcgtataatcaggatgaattgagtaacccttcaacgacggggttactcaagattgaggaaggattatcgttcggcgaccagacgaataatatcttcgtcttcaaccgatttttgactctcaacggtctttttatctgctttctctggttcgtttgcttcgcacaaacgacgtaacagtgcattttgacgtttttgctgatccagcaacgcctcaagcagttcaatctgttcgttagtccgtgaactggcacgattgataaaaaaccacaagatgagcccgataagaagaaccaccaccgatacaaccaaagacgcaatgttcatcacgcctgaatttacaacttcgttcatttcaccacctctgagtagaggcgctattctaccactgctggagaggaagaaaatctagtgctgaaaaaatgatatcaccacgggataaactggttaatggcacaaattccgctgaaaaattgtacatcctgatcgcacatcatgttgaatacctgcgcccaaagcagcaagcaagccaacaccacgacaaccagaacgacccatcgaaactttttcactccaatctccgtttcacctaccttatgtcattaaactagcatgcgttagttaaacagcgcctaactatgtcgatattcgtgctttttcggaatgagtcgcttgcttcagcgcatattgccgctacgattaagcgaacataaaaagagaagaggttgtaatgcgattcatcattcgcacagttatgctgatagcactggtatggataggattattactcagcggatatggcgttttgattggaagcaaagagaatgccgcaggattaggtttgcaatgtacctatctgactgccagaggcaccagcacggtacaatacttgcacactaaaagtggttttttggggataacagattgcccgctgttacgcaaaagcaatatcgtggtcgataatggttaagggcaataaataaccagattctcactcctgagtaaaatactcttatagcaagcgcgtttaatataacgccaccttcaactttatttttctcatgctaaataaagaacctgtctgtttgatattccgacaggttcttactctcatcagaacggatagtcgtgataacccatttgggcagaaattttgcgcgctgcggtatgcaacattgcgacatattcctgtaaacgctcttcagagaaacgcaacgtcgggaaggagatgctcaaaccggcaatgaccacgccaaagcgatcaaataccggtaccgcaatgcatcgcagcccttcttcctgctcttcattatcttcgccatacccctgctcgcgcacctggtccagaacgggtaataacgcttctgtactggtgatggtccgctcggtactgcgtttatactccacgccctcaagaatttgcttcacttcatcgcgatcgcgccatgccagcagtaccttaccaatcgcggtgctgtacagcggattacgacgcccaatccgtgaatacatgcgcaaattgtacatagagtcaattttgtgaatgtaaacaatactgtcttcgtccagtgcgccgaggtggatagtttctttggtcaggcgggagagctcacgcatctggatatctgcgctacgaattaaatcgacgttttgtaacgcgcgagcgcccagttcaaacaatttcagggtcagggaatatttctccgactccccttcctgcgccacataacctaaggttttcatggtctgtaaaaagcgataaacggtgctttttgacatcatgacgcgctgcgacagctcggttatccctatttcgcgctcttcacccagcgcctgcaaaatgccaaaaacttttagcacggaagatacagaatcaggctgtttatccagatctgcgttagccatttatcacctcattgcgagtgttttataaaaatcagaactgttttttattataatttcgcaccagggtggtcgcaatccatcttttgccggttagttacaattctgcgacatccaccgtgaatatcagtgctagaatcatacccctgttgattattcaccaaagatataaaattcctatgccaaaagttcaggccgacggcctgccattgccccagcgatacggtgcgatattaaccattgtgattggtatttcgatggccgtccttgacggcgcaatcgccaacgtcgccctgccaacaatcgccacggaccttcatgccacgccagccagttccatctgggtagtgaacgcctatcaaatcgccattgtcatctccctgctctcgttttcgtttctgggcgatatgtttggctatcgacgtatttataaatgcggtctggtcgtttttctgttgtcttcactgttctgcgccctttctgattcgctgcaaatgctcacccttgcgcgtgtcatacaaggtttcggcggtgcagcgttgatgagcgttaataccgcacttatccgcctgatctatccacaacgttttctgggtagagggatgggcataaactcgtttattgttgccgtctcttctgctgccgggccgacaattgctgcagcaatcctctccatcgcatcctggaaatggttatttttaatcaacgtaccgttaggtattatcgccctgcttctggcgatgcgttttctgccacccaatggttctcgcgccagtaaaccccgtttcgacctgcccagcgccgtgatgaacgcgttaaccttcggcctgcttatcactgcgttgagtggtttcgctcaggggcaatcgctgacgttaattgctgcggaactggtggtaatggttgttgttggtattttctttattcgccgccagctttctcttcccgtaccgctgctaccggtggatttactgcgtatcccgctgttttcactttctatttgcacatctgtttgctctttctgcgcacaaatgctggcaatggtttccctgcccttttacctgcaaaccgtgctcgggcgtagtgaagtcgaaacaggtttacttctgacaccgtggccgttagcaacgatggtgatggctccgctggcaggctatttgattgaacgcgtacatgcaggattgctgggggctttagggttgttcatcatggctgcggggcttttttccctggttctgctgcccgcgtcacctgcggatatcaatattatctggccgatgatcttatgtggtgctggatttggcttattccagtcacccaataaccacaccattattacctccgcgcctcgcgaacgtagcggtggagccagtggcatgttaggaacggctcgtctactgggtcagagtagcggcgcggcgctggtggcgctgatgctaaatcagtttggagataatggtacacacgtctcgctgatggctgcggctattctggcagtgattgctgcctgtgtcagtggtttacgtatcactcagccacgatccagggcataaaaaaagcgcgtcgatcaggacgcgctttttagtatttacttcatattacttcaggtattcacccgtacgcagagcttcaattcgtttatccagcggcgggtgggtcatgaacaactcactgagcgatttcgacttaccgttaatgcagagagccatcatgctggttgcttcttgcggttcatagctggttttcaggcgctgcagcgcggcaatcattttctcgcgaccaaccagttttgccgaaccggcatcagcatggaattcacgatgacgcgagaaccacatggtgataatgctcgccagaataccaaacaccagttccagaaccgttgcaaccgcaaagtagatcagcgggttgccgttgctctcttcaccttcatcacgatttccgcccataaaacccgcggcaagctgcgccagaatacgggaaataaagataacgaaggtgttcaccacgccctgaatcagcgtcatggtgaccatatcaccattggcgatgtggctgatttcgtgagcaattaccgcctcggcttcatccgggctcatgttctgcagcaaaccggtgctgacagcaaccagagaggcatcacggcgcgcaccggttgcaaaagcgttgatgtccggcgcatggtagatagccacttgcggcatagcgatccccgcctgacgagcctgggttgctacagtattgaccagccaacgttccctttcgttacgcggttgctcgatcacttccccgccaacagatcgtaatgccatccatttggacatcagaagcgaaacgaaggaaccaccaaaaccgaacagcaaggccatgatcatcagcccctgaacgctgctcgactgtatccctgtcaggctcagtaccagcccgaaaacgaccattacggccaggttcgttagcaggaagagcgcgattcgcatcataattttctttttacctcagtttaacaaaacgcaatatgcgatacccacatcgtatgggttacgcgactattttcaagtctggatagtgcgtaagtcaccagaaagacacaactttacattttgtagcatctgatttacggcatcttgtcgctgttaaaaaatcaggcacaatttcttgtgcctgattgatattacttgacgggagcgggttgttccgcgggtctggctttttcaagcttcgccagatcgagtgcgatattcaccgtctcatccagataaggatccggctcctggtaatctttcggtagatcatccagtttcttcaactccggtttaccttcgcgtttaaagcgttcgttcaaacgcgccagacgcgtcgcatcatcttcattattctctttctcacgcacagcgtaattcagagaaacgatattgcgcttgtccttcatagcgttgaagcgcgcgatatccttcatgatgttctggaactcaggatctttcgcgatacgcgcattatgttccttcagcagctccggttcaaaggccgttaaatctcctgatttcacataagtcgcggcatcaatgctatcccacggcagcgcgttatcttcgaatttctcacccgtttccgtttcttcattacccgtcggcatgatgatgtctggcgttacgcctttacgttgcgtactgccgccgttaacgcgatagaatttctggatcgtgtactgcacagaacccagcgctggccattcaggacgtaacatctgatcgtaaatacggttcaatgaacggtattgctgaacggtgcctttaccaaacgtcggttcacccacaaccagcgcacgaccgtaatcctgcattgccgcggcaaagatttctgaagccgaagcactgaagcggtcaaccagcaccaccagcgggcctttatagaaaacctgtccgtcggtatcgctatcttcacgaaccttgccgttgttatcgcggacctgaacaatgggacccgcaggaataaacagaccggagagcgatacggcttcagttaacgccccaccgccattgctacgcaggtcgatgatgacgctgctgacattctgtttttccagtttctgcagttgcactttgacatcgtctgtcaaacccacatagaagcccggaatatccagcacgccgactttctctttaccgacggtcttcaccgacattttaaccgcgcggtcttcgagacgaatacgttcacgggtcaacgttacagtacgggtcttggtccctttaccagcaggtaaaatttccagacgaactttactgcccttcggccctttaattaaggcaaccacatcatcaagacgccagccaatcacgtcaaccatcggcttgcctgtttgaccaacaccgacaattttgtcaccaacgctgatagctttactcttcgctgccggaccacctgccaccatcgaattgataacggtgtagtcatcatccatttgcagcactgcgccaataccttccagcgacaaactcatttcagtgttgaactgttcggtattacgcggggaaagatagttggtatgcgggtcgatttcacgcgcaaacgccgtcattgccagcgagaaaacatcttcgctgttggtttgcgccagacgacgaatggcaaatttgtagcggcgagtcagggtttcacgaatttctttatccgtttttcctgtcagcttcaggcttaactcgtcgaatttgactttactgtcccacagcgcgttcaactcagcctcgtttttcggccagggcgctttgctgcggtcaaggttataagtgtcgttgccggtgaaatccatcggcttttccagtaccgacaaagcgtactggtaacgctcaaaacggcgcttttgcgccagattgtagagatcgtagaaaacgtcgagtttgcctgaacgcagttcatcgcctaactcggttttctttttcgcgaactgttcaacatcgcttgccagcagcacgttgtggctgtaatcgagcagattcaggtagcggtcaaagattttggccgaaaatgcctgatcgaggtcgaactggcgataatgagaacgggtgaagcgcgacgttacgcgctcacttaccgtcgcatgctgcgtctcttcctttaataccggaatttgatcagcacgcgtgatatcttctacagcgaaggtctggcctgctattgcaagcaggccagctaacgcggtaagcctaaaaaacatgttcatgcctggcccggcctccgtttcagaacaccaggtgttctgcgcgcacaatcaaagacatacccgaattcagctggacgcggacgccgtctttggtgatttctaatacggtggcatccatcgcgttttgacccgctttcaccttcagggcttgtccgacagtcagagctgaaatgtcagaaaccggggtgtgctgttcttcgcgaggtgcttttactgtttttggcgctttctctaccggcttttgcgcacgaggtttacgttcagcgccttctttgcggcgtggcgtagtcggacgtggcttgcgttcgcggcgcggtgcgtcttctttctcaccagcagttgcggcagcttcgcgttttttcgcttgctgttcagcacgctgtgcctgaacacgcgctttcgcttcttcaagctgcttgcgagcatgctctacatgttgctcgtccagctcaccgcatgggttgccgtcaagatcgacacgcgttgcgccgggtttaacaccgtaaagataacgccagctcgaagtgtagagacgtaaagcggatcgcaattgcgttttgctcaggttcatttccccagcaacacgatcgaccaaatcctgaaaaataccgattttcagcggacgcgcttcaccttccgcactgaaacagtggggaaaacgttcggccagaaacgcgattacttctttactgctattcaacttaggttgattttccatgaaatttcctgattacaacggacgtagccaacaagcgcaggcatgaacaggcgtcattataatgacgctatcagtaaatgctacgttatccgttgattatcctgcgacgctcgcaaagaattttttgtaatccgtcgttgcaagcactttttcaagctgtgccacaagctgacgtaagccttgctcgtcctcgtctgtaaagcgaccgaagacggtactatcgatgtcgagaacaccaataatctgatttttcaccaccagcggcagaacaatttcagaattactcgccgcatcacaggcaatatgcccgtcaaacacatgaacatcctcgatacgctgcacttgattgcgggcaaccgcagtgccgcacacgccgcgcccgacgggtatccggacacaggcaattttgccctgaaatggtccgagtaccagtgtatcgtcctcaagcaaataaaaacctgcccagtttatgtcagtgagacgctcatataacaacgcactggtgttcgcaagcgttgccagaaaactggtttctcccgccatcagcgcgttaaagtcgcgatttaaatccgcgtaaaattctgttttgttcattatataatcacttggttgtcttacctggatctgccagcctattaaaataagcattaaatgcgttaatgctcaagatcattcccatcatgggttaagattaatgttaattcttattacatttggcacgtcatggctcttaacacaccacaaattacgccgacaaaaaagataacagtgagggcaatcggcgaggaactgccgcgtggtgattaccaacgttgcccgcaatgtgacatgctgtttagcctgcccgagataaattctcatcaaagtgcctattgtccgcgctgtcaggcaaaaattcgtgacgggcgcgactggtcgctaacgcgcctggcggcaatggccttcaccatgctgttgcttatgccgtttgcctggggcgaaccgctgttgcatatctggctgttaggcattcgtattgacgccaacgttatgcaaggcatctggcaaatgaccaaacagggcgatgcgataacggggtcgatggtctttttctgcgttattggtgccccgctcattctggtgacctccatagcttatttatggtttggtaaccgactgggaatgaatttacgtccggtactgctgatgcttgagcgacttaaagagtgggtaatgctcgatatctacctggtcggcattggcgttgcttctataaaggtacaggattatgcccatatccaggctggtgtcggcttgttctcttttgtggcgttggtgattttaacgacggtgacgttgtcacatcttaatgtcgaagaactgtgggagcgattttatccgcagcgccccgctacgcgtagggacgagaaacttcgtgtctgtcttgggtgccattttaccggctatccagatcagcgtggtcgctgcccgcgttgccatatcccgctacgcctgcgtcgccgtcatagtctgcaaaaatgctgggcggcgctgttagcgtcaatcgttttattgttacctgccaacctgttgcctatttctatcatttatctgaacggaggacggcaggaagatacaattctttccggaattatgtcgctggcaagtagcaacattgcggttgcaggaatcgtgtttatcgccagtattctggtaccgtttactaaagtgatcgtcatgttcactttactgttgagcattcattttaaatgccagcaaggtttacgcacacgcattctgttactgcggatggtgacctggattggtcgctggtcgatgctcgacctgtttgtcatatctttaaccatgtcgctgattaatcgcgatcagatcctcgcttttactatgggaccggctgcgttttatttcggcgcagcggtaattttgactattcttgctgtggaatggctggacagccgcttactttgggatgcacatgagtcaggaaacgcccgcttcgacgactgaagcgcagattaaaaataaacgccgtatctcacctttctggctgctgccgttcatcgcgctaatgattgccagttggctgatttgggacagttatcaggaccggggtaataccgtcaccatcgactttatgtcggcggatggtattgttccaggccgtacgcctgttcgttatcagggcgttgaagtcggaacagtgcaggatatcagcctcagcgacgatcttcgtaagattgaagtcaaggtcagcatcaagtccgatatgaaagatgcgctgcgcgaagagactcagttctggctggtgacgccaaaagcatcgttggcaggtgtctccgggctggacgccctcgtcggtgggaactatatcggcatgatgccgggtaaaggtaaagagcaggatcactttgtcgcactcgatacccaaccgaaatatcggctggacaatggcgatctgatgatccacctgcaagcccccgatctcggttcgctgaacagcggttcattggtctatttccgcaagatcccggtgggaaaagtctacgactatgccatcaatcccaacaagcaaggcgtggtgattgatgtcctgatcgagcggcgttttaccgatctggtgaaaaaaggtagccgtttctggaacgtttccggcgttgatgccaacgtcagtatcagtggcgcgaaggtgaaactggaaagcctggcggcactggttaacggtgcgattgccttcgattcaccagaagagtcgaaacctgccgaggcggaagatacctttggtctgtatgaagatctggcccacagccagcgtggcgtaataataaaactggaactgccgagtggggccggattaaccgccgactcgacgccgttaatgtatcaggggctggaagtcggacagctgactaaactggatttaaatcctggtggtaaagtcacaggggaaatgaccgttgatcccagcgtcgttaccctgcttcgtgaaaatacccgcatcgaattacgcaacccgaaattatcccttagcgatgctaatctcagcgccctgctgaccggcaaaaccttcgagctggtgcccggcgatggcgagccacgcaaagagttcgttgttgtgccaggcgaaaaagcactgctgcatgaacctgatgttctgacgctgaccctgaccgcgccggaaagttacggtattgatgcgggtcagccgctcattcttcacggcgtgcaggtaggccaggttatcgatcgtaaactcaccagcaaaggcgtcacctttaccgtcgccatcgagcctcagcatcgcgaactggtaaaaggcgatagcaaatttgtcgtcaacagccgtgtcgatgtgaaggtggggctggatggcgttgagtttctcggtgccagcgcctcagaatggatcaatggcgggatacgtattctgccgggcgataaaggtgagatgaaagccagctatccactgtatgccaatttggaaaaagcgctggagaacagccttagcgatttacccaccacaaccgtgagtttgagtgcagagacgctgccggatgtgcaggcaggatcggtagtgctgtaccgtaaatttgaagttggtgaagtgattaccgtgcgtccgcgagctaacgcgtttgatatcgatctgcatattaagccggagtatcgcaaccttctgaccagcaatagcgtgttctgggcagaaggcggggcgaaagttcagctgaatggtagtggtctgaccgtacaggcatccccgctctccagagcattaaagggagccattagcttcgacaacctcagcggtgccagcgccagtcagcgtaaaggcgataagcgtattctgtatgcttccgaaacagcggcccgtgcggttggcgggcagattacgcttcacgctttcgatgccggaaaactggcggtcgggatgccaattcgctatctcggtattgatatcgggcaaatccagacgctggatctgattaccgcacgcaatgaagtacaggcaaaggcggtactttacccggaatatgtccagacctttgctcgcggtggtacgcgcttctcagtggtcacaccgcaaatttcggcagctggcgttgagcatcttgatactatcctccagccgtatatcaacgtcgaaccaggccggggcaatcctcgccgcgactttgaattacaagaggccaccattactgattcgcgttacctggatggcttaagcattattgttgaagcgccggaagccggttcgttaggcatcggtacgcctgtgctgttccgtggtctggaagtcggtacggttacaggaatgacgctggggacattgtcagatcgcgtgatgattgcgatgcgcatcagtaaacgctatcaacacctggtgcgtaacaattccgtcttctggttggcatcgggttacagtctggactttggtctgacgggcggcgtagtgaaaaccggcacctttaaccagtttatccgtggcggcatcgccttcgccacgcctccgggtacgccactggcaccgaaagcccaggaaggcaaacacttcctgttgcaggaaagtgaaccgaaagagtggcgtgaatggggaactgcgcttcccaaataatgcccactgctccggcgtgcctgcgccggagcgtttatgctaaactgcgcgcctgtttttttgccagtggtacatgctcgtggcccaacacaccgtttatttcccggacgcctttctgacacaaatgcgcgaagcgatgccttcgacgctctcatttgatgattttcttgccgcctgtcagcgcccgttgcgccgcagcattcgcgttaatacgctgaaaatctccgttgctgatttcctgcaattaaccgctccttatggctggacgcttacgccaattccgtggtgtgaagaaggtttctggattgaacgcgacaatgaagatgcattgccattgggtagtaccgccgagcatttaagtggcctgttttatattcaggaagccagttcaatgttgcctgttgccgccttgtttgctgacggtaatgcaccacagcgggtgatggatgtcgctgccgcgcctggctccaaaacgacgcaaatttccgcgcggatgaataacgaaggggcaatccttgccaatgagttttccgccagtcgggtaaaagtgttacatgccaatatcagccgctgtggtatcagtaatgttgcgctcacacattttgatggccgcgtgtttggtgcggcagtgccagaaatgttcgatgccattttgctggacgctccctgctctggcgaaggcgtggtgcgtaaagatcccgatgcgctaaaaaactggtcaccagaaagcaatcaggaaatcgcagctacacaacgggagcttatcgacagcgcctttcatgcattacgtcctggtggtacgctggtttactcgacctgtaccttaaaccaggaagaaaacgaagccgtttgcctgtggctgaaagagacttaccccgacgcagtagagtttttaccacttggcgatctcttccctggtgcaaacaaagcgctgaccgaagaaggctttttgcatgttttcccacaaatttacgactgcgaaggcttcttcgttgctcgtctgcgtaaaactcaggcgattcccgccttacccgcccccaaatacaaagtcggtaattttccgttcagcccggtgaaagatcgcgaagctggacaaattcgtcaggcggctacaggtgttggcttaaactgggatgaaaacctgcgcctctggcagcgtgacaaagaactgtggttgttcccggtgggcattgaagccctgatcggtaaagtccgattttctcggttggggattaaacttgccgagacgcacaacaaaggttatcgctggcagcatgaagcggttattgctcttgcctcacccgataatatgaatgcattcgagctgacaccgcaggaagcggaggagtggtatcgcgggcgcgatgtttacccgcaagccgcgccagtggcggatgatgtattggttactttccagcatcaaccgattggtttagccaaacggattggttcgcgattgaaaaacagctatccgcgtgaactggtgcgcgatgggaaactttttaccggtaacgcctgacagcgcacaaaaaaagcgcactttttgactggcacattcggctgcctcaactaggctgaaaaatggtgcgatcggactggtcgtaccacaatcggcagctaaatggagagcacgaagatgaaaaccagtgtgcgcataggcgcttttgaaatcgacgacggcgaattacacggtgaatcgccaggtgatcgaacgttaaccattccttgtaaatctgaccccgatttatgtatgcaactggatgcctgggatgctgaaaccagtatccctgccctgctaaatggcgaacactctgtcctttaccgtacccgttacgatcaacaatctgatgcctggattatgcgtcttgcctgatccaaaaagaacccgtcggcatggcgggttatttgtcctggttattcccccgttgtaaaatctctcctaaacttaacggtacggcaccacacttcggggatgaaatgttcgcgctggtactttttgtttgctacctggatggcggttgtgaagatattgttgtggatgtctacaacacggaacagcagtgtctttattctatgagcgatcaacggatccgccagggcggttgttttccgattgaggattttatagatggtttctggcgacctgcacaggagtacggtgatttttaattattgcaattgcacaagagtcagttcgcccccaaagacagcaccggtatcaatataatgcaggttgccaatatccacgcgatgtcgcaacggtgtatgaccaaaccagaaatgatcagcacctgtaattccctgccctttttggcgttcacctaatcgcgagcggctccacaagacctgatgcaaatcaacgtccttttgccattcataaacatcatctggataatcggcatgagcaataacatgcttgccggtgcgactgtgtacttcaagaataaagggcaaatgctgacatttttccagcgccgttttcgcttgtttctgttgattatctgccagcgcaataaaccagtcgccgccattcatcaaccacaaagacatctgctgggatgccagcgcatccatcgccatctgttcatgattgcctcttaccgcacaaacccaatgttgttccagtaactgcagacaacgtaaactttgcggcccacgatcgataacgtctcccactgagataagtaaatctcgccacggatcaaaacgacaatgccataatttgcggcgcaactgctcaagacaaccgtgtatatcgccagaaagccagatatgtcgccattgatgacccgcaattctctgataaacgggcgcaggctgtttcatcaatattttcctcccgcgctaaagatcacataatcttaacaagaatgttaaaaaacgctggactcagacagtagagtgtgtgttatggttgactataaagtcagcgaaggaaatgcttctggcttttaacagataaaaagagaccgaacacgattcctgtattcggtccagggaaatggctcttgggagagagccgtgcgctaaaagttggcattaatgcaggcttagttgccttgccctttaagaatagatgacgacgccaggttttccagtttgcgtgcaaaatggtcaataaaaagcgtggtggtcatcagctgaaatgttaaaaaccgcccgttctggtgaaagaactgaggcggtttttttattggaaatcaaaaggctattttaggtaattaacagagtttttcagctcgttctataaacggtgccagactcattttttcgccgggattgttaggatcatcaatctgaatcaccgaaatgggttgggcattggtcttcccactggcaacttccttttgtgcgatatcgtttaaaggatactgcacgagggtactcggattaataacatacaaagcattacccggtcggcaagtcagcatcacctcttcgcgattaaacgcccatttgtctttacccacttcaaaacgactgacggtaatcacctgcggtgcagccagcgccgctgcagaactggtgagtaacagaaacgccagaatactttttttcatcattttcgtaatccatcaaaaaggttcgagagtcgcaagcaggctgatgatcaccagcactaccgcacctatcgcccattcgagtttagtcatccacacaaaccagggtgccgcacgatcttcatcctgcctcatgcgcggtacaagaacataacgattagccagcgcaatgaccaccataatcatcaccaggatggctttgagcaataagagttggccccagtaagtcgtaagcgtggggggaaatccggtaatcaacaatgcattaagcacgccgcttgccagtacgccgatcaccgcaaaatgcccgcaccaggaaaaacgcatcagcgcctgaatagcctggtgtcgccaacggcctttgatgagttgcatacaccagagcaccggcagtaatcccccaaaccacgccgccgcacaaatcaggtgaatcgcgtgattagtctgatggattttcgctgttaccccttcattcagcgtcgcatgccccactcccgccagcagaataaattgcgcggtagtgagcataaacagcaaacgtggcatattccgcggttgcataagggcgacgatcaacgttacgagggcgagaacaatttgccataaccagatgccaccaaactgcgtttgcaaaacagcctgccaaatgtttggcgaaaatacatctgtccatcccgttcccatcaacccgccctgaacggcgagcattgcagtggcactgatcaaactccagacggcagcgtgctgttgtaaacgcagaaaacgcttcgccagcaagcgacgaatcgtcaagggggccagccaggcaccgtacattgcgaagccaaaaaccagcatcagcgaggtgaaatggataaatcgcagcgcgatccaggtaaacgccagcatgatttatttcacgctaaaggtgtagtgtcctttcgttttatgcccgtccaccgaaacaacatgccagtcaacggtgtaggttccgggtttcagcgaatcggccagtggaacaatcagttgcttttggtcctgctcatttcgcttcgccggtaatgttttaatattttcgttttttggccccgtgatttttgcaccactgaatcctgtttcaacaccttccgagaagtttaaagtgattgcctgcggtgcagctgtcacttgcgcgtttgccgcaggatactgatgcgttaaatgcgcatgtgcccagacggaaggtgtcaccaacgaagtggtcaggattgccagcgcgtagcgaagggagcgtgcagttgaagccatattatctattcctttttgtaataacttttttacagagcataaccttgtctaatgtctgagtcgaggatcatcaattccggcttgccatcctggctcactcttagtaacttttgcccgcgaatgatgaggagattaagaatgctgaagaatctggctaaactggatcaaacagaaatggataaagtgaatgtcgatttggcggcggccggggtggcatttaaagaacgctacaatatgccggtgatcgctgaagcggttgaacgtgaacagcctgaacatttgcgcagctggtttcgcgagcggcttattgcccaccgtttggcttcggtcaatctgtcacgtttaccttacgagcccaaacttaaataaaacttatacagagttacactttcttacataacgcctgctaaattatgagtattttctaaaccgcactcataatttgcagtcattttgaaaaggaagtcattatgtcgttctggaaagttgcagcagcgcaatatgagcctcgtaaaacctcactcaccgaacaggtagctcatcatctggagtttgtgagggccgccgccaggcaacaatgtcagctgttagtttttccatcgctttctttactggggtgtgattattcgcgacgtgcccttcctgccccacccgatctctcactgttagacccgctttgttatgccgcaacgacctggcgaatgaccatcattgccggccttcccgttgaatataacgatcgctttattcgtggaattgcggtgttcgcaccgtggcgaaaaacgcctgggatctaccatcagagtcatggtgcatgtctgggccgtcgttccagaaccatcacggtggtcgatgaacaaccgcaaggtatggatatggacccgacctgttcactgtttactacagggcaatgtctgggagaacccgacctgctggcgtcggcccgtcgcttacaatttttttcacatcagtactcgattgccgtgctgatggcaaatgcccgtggtaacagtgcactatgggatgaatatggtcgtctcatcgttcgcgccgatcgtggttcattattgttagtcggtcagcgttcatcacagggttggcaaggcgatatcattccattacgctaggctttttcggcctggagcatgccatgttgcgcattatcgatacagaaacctgcggtttgcagggagggatcgttgagattgcctctgttgatgtcattgacggaaaaatcgtcaaccccatgagccacctggtgcgccccgatcgtcctattagtccacaagcgatggcgattcatcgcatcaccgaagccatggtcgccgataaaccgtggattgaagatgtgatcccacactattacggtagtgaatggtatgtcgcgcataacgccagctttgaccgccgcgtactgcctgagatgcccggtgagtggatttgcactatgaaactggcccgtcgtttgtggcctgggatcaagtacagcaatatggcgttatataaaacacgcaagctcaatgtacagacgccgccgggcctgcatcatcaccgcgcgttgtatgactgttatatcaccgccgcgttgcttatcgatattatgaacacctccggctggacggcagaacagatggccgatatcaccggacgtccgtcgttgatgacgaccttcacctttggcaaataccgtggcaaagcggtttccgacgttgccgaacgcgatccgggctatctgcgctggttatttaataacctggacagcatgagcccggagctgcgtttaacactgaaacattatctggaaaatacttagtccgcaggcgtagcgggtaatgttccctgcgccagcgcgaccagaaaagcatattccatcgctacgccttcgtacgatttaaagcgaccagatttaccgccatggcctgagtccatgtcggtacagagcaataaaagatggtcatcggttttcagctcgcgcaatttagcgacccattttgccggttcccaatattgcacctgagaatcgtgcaaaccggtcgttaccagtaaatgcggataagcctgtgcggtgacgttgtcatacgggctgtagcttttcatgtactcgtaatattgcggatcctgcgggttaccccactcttcaaactcaccagtggtaagaggaattgattcatcaagcatcgttgttacaacatcaacaaacggtacctgggcgataacgccgtggaataattccgggcgttgattaattgcaacgcccatcaacatgccccccgcactcccgcccatcgcataacaaagcgaaggagagccatagcccagttttaacaatgcatcgcaggcatcaagataatcattaaacgtatttttcttcttcagaaattttccgtcttcgtaccattgttgccccagctcaccaccgccgcgaacatggacaatggcgtagacaaagccacgatctaacaaactcaagcggctaaaactgaaatcggcatcaatacttgcgccgtaagaaccatagccatacaccagcaacgggttgtgtcctttgcgaaaatgtttgcgatggtagaccaacgaaaccggaacttcgacgccatcacgggcgactatccacaggtgttcactgcggtaattcgccgcataaaaaccaggaacttccgtttgttttaatacacgacgctcaccggtatccatatccagttcaaacaaagtgtctggtgtagtcatggaagaataaccataacgcaatcgcgcggtttcaggttctggattgtaggcaatccaggtcacataggccggatcatcaaaggcaataccaatgacttcccgggtcttgcggttaatttggcgcaaactggttaacccgcgctgacgctcttcaaccaccagccagtcggtaaacagcgtaaacccttccagcatgatgttttcgcgtggcggaattaactcttcccactgttgctcatcacgcatacgggtacggtataagccaaagtttttgccgtggcggttggaacgcagataaaaacgatgctggtagtgatcaaggctgtattcgtgatctttgcggcgcggcagaaaaacaaacggctcggcatcggccatttccgcgtccagcaggcgaacttcactggtggtggcgctggccaaatgaatgactacatagtgcttcgaggtcgttttatgcaggctgacgtaataggtatcgtctttttcttcgtagatcagtttatcttgcgatgctggcgtaccgatggcgtgacgccagacctgataaggcagcagcgtcaccggatgcttgcgaacatagtagaaaatccaggagtcatttgcccagacaaagctgggttcaacgttatccagcagttccgggtaccagttaccagtttccagattacgaaaacgaatgccgtactggcgtcgggaaagaaaatcttctgccagcgccataatggtgttatcgggcgtaatcgccattccgcccatcgaataaaactcactatgagctgcgcgcttattggcatcgagcaatgtttcccactcatcccactcttcactgaatgccgattgacgctggtagatagcatattcacagcctggttcataaatatgccgatagcggtagccatttttgatgtagggcgcagaaacttctcgttgcggaatgcggtcgatgatttcctttaagatgcgatcctgcaaggcttgttgtgaggccatcacccgatgaccgtaactattttcttgttgcaggtagtccaggacttctggctgagaacgcgtatcgtcccgcagccagtagtaattatcgatgcgcgtatcgccatgaagcgtcatggcgtggggaatgcgggcggcttttggtagcatgttattgttctttctggttgaaacatcttataagggtggcaaaactcaccggggatgcaagcgaaacaggggagtcattgcttagatgatgacaggtaatggcgcggatatcgaatgttatgcagacagagaaaatcagcctgttcaaatggctgtgcgattctggatagcccgaaatagtcaacttcaggctatccagagagcggaattattccgccaaagtgcgtttttgctgttcgagatcgcgttcaatgccgtcacgaacatcctgggggattttcagcgcgtcacccagtgcattcaggtaactgcgttccataaaatggtcaatatcaatagccgcgcaactcaggaaatagatttccagcgcctcttcttcattgcggaccccggtagccaggcgttgtggatccagcggttgttcgattgcctgctcaatgagtacacgcccctgctcttccacgccggctccacgcaattgctggtcgattgccgcacgttctttggcatcaatatgaccatcacttttagcggcaaagaccagcgcaaggatcaaacgtgctgtacgctcatccagcggcgtactttgcgcgccaaactgcggttcgtcctgatgcgccgcgcgaattttatctttgtatttattccacagcaccgtacccgctaccgctccgccgccaaccagtaacgcgttggtgccatatttcgtaagaagtttacgtgctgatttatttgcgaccagcagcccagccagtccgcctaatgcgcctggcactaacagtttgaccaatccctgatccgcagacgaggaggtagaagaactgctttgcccaagcagggattgcagttgatttaaccagttagccatatttgctcctcaataaccatttttagtgcctgtagcatagcggatgaggatgtcagaaaatgtatatcgagacaaaagatgcgcaaataagcggggcggtaggccgttattcaaagaaattcgcgccaggtaaggtatttactgtatatcaggtgataagggtattttaggtgaaagtagtttgtcgttttgagtggcattgtttgatgctgattgcccgatgcgacgctgttgcgtcttctcaggcctacgattgtggtgcgttctggggcggacaaggcactcgcgccgcatccgccaacagtcaatcgaattatcagaagccattaacgccgctgatattccgccattcccgctttgcagtccacgctgacctggtaatgaatatcggcacttttaccacgcacggttagcggtactgaccatttatcatctttaccctgaatgtcctgcaaactgacccaagccacgggatcggcctgaccgacaattttttgatcatctgcccaacgcgccacgcgattttgttgataatcacgttttacgctcgcggcaattccggcagcatccagatcttcacactttgggaaagtgaccgacttgctggtttcattattggcagcgaaaactgatgcgcaggcagaaaccaacaacagccctaaaaacgcccctctttttttcatgtttttctccatagcacaatgattcaggagaaagcatggtacaaattgtcaggagcgcaagttgcttcaggccgcgtgtgaggcatcttcctcttcggattcagcaccgacgacctgtggggacggtaatttgccggttttcagaatggtgctcagcacatctttttgttctgccagccatagcgaaagggcttcacgttgctcgtcttccatttgcactggagaatttgtcagccaggtgtcaagcagatccgccgtatcaagcattttgtcataagcatcggcttcctttttgctggtaaacgacattttctcttcgccctcacgaatgactacgtatttaacttcaaccgccatttgcagcctctcataataactgtgattttatacagtatatttcttttcggttgagaaatcaacatcagcaataaagacacacgcaaacgttttcgtttatactgcgcgcggaattaatcaggggatattcgttatgacgttattaggcactgcgctgcgtccggcagcaactcgcgtgatgttattaggctccggtgaactgggtaaagaagtggcaatcgagtgtcagcgtctcggcgtagaggtgattgccgtcgatcgctatgccgacgcaccagccatgcatgtcgcgcatcgctcccatgtcattaatatgcttgatggtgatgcattacgccgtgtggttgaactggaaaaaccacattatatcgtgccggagatcgaagctattgccaccgatatgctgatccaacttgaagaggaaggactgaatgttgtcccctgcgctcgcgcaacgaaattaacgatgaatcgcgagggtatccgtcgcctggcggcagaagagctgcagctgcccacttccacttatcgttttgccgatagcgaaagccttttccgcgaggcggttgctgacattggctatccctgcattgtaaaaccggtgatgagctcttccggcaaggggcagacgtttattcgttctgcagagcaacttgctcaggcatggaagtacgctcagcaaggcggtcgcgccggagcgggccgcgtaattgttgaaggcgtcgttaagtttgacttcgaaattaccctgctaaccgtcagcgcggtggatggcgtccatttctgtgcaccagtaggtcatcgccaggaagatggcgactaccgtgaatcctggcaaccacagcaaatgagcccgcttgcccttgaacgtgcgcaggagattgcccgtaaagtggtgctggcactgggcggttatgggttgtttggtgtcgagctatttgtctgtggtgatgaggtgattttcagtgaggtctcccctcgtccacatgataccgggatggtgacgttaatttctcaagatctctcagagtttgccctgcatgtacgtgccttcctcggacttccggttggcgggatccgtcagtatggtcctgcagcttctgccgttattctgccacaactgaccagtcagaatgtcacgtttgataatgtgcagaatgccgtaggcgcagatttgcagattcgtttatttggtaagccggaaattgatggcagccgtcgtctgggggtggcactggctactgcagagagtgttgttgacgccattgaacgcgcgaagcacgccgccggacaggtaaaagtacagggttaaacccggcaaaaaaacgctacaaaaatgcccgatcctcgatcgggcattttgacttttacagcttagcgccttctacagcttcacgcgccagcttagtaatgcggtcgtaatcgcccgcttccagcgcatctgccggaaccagccaggaaccaccgatgcacagcacgcttttcagcgccaggtagtcacggtagttagccggagaaataccacccgtcgggcagaaacggacctgggagaacggacccgcgatcgcctgcagggctttcacgccgccgttagcttcagccgggaagaatttgaactctttcaaaccgtagtccatacccagcatcagttcggaaacagtgctgatccccggaatcagaggaatagtcccttcggtagcagctttcagcagcggctcggtcagacccgggctaattgcgaactgtgcacccgcttcagtgacttctgccagctgctgtggattcagcaccgtaccggcacccacaatcgcttcaggcacttctttggcgatagcacggatagcgtcaactgcacactcggtacgcagagtcacttccagaacgcgcaccccaccagcaaccaacgcttttgccatcggcaccgcgtgttccagtttttttaccacgataaccggtacaaccgggccggtggtcaggattgattctgcacttgttttccagtttttcatcagagttttctctcgcctgattacaaatttgtcgtcttaaaaagtgatacaggttgcgccctgttcggcaccggacagtttttcacgcaaggcgctgaataattcacgtcctgttcccacgcgtgacgcgctcaggtcaggaatgtgcggttcgcgagcagccagttccgcttcgtctaccagcagcgtcagttcgcctgtctgtccattcacacgaatgatgtccccgtcgcgcacttttgccagcagcccgccatcgtaggcttctggtgttacgtggatagctgacggcactttacctgaagcgccggagagtcgtccatcggtaactaacgcaattttgaaacaccggtccaataatacaccaagtggcggcatgagtttatgtaattctggcattccgttcgcttttggcccctgatgacggacaacaacgacacaatcgcggtccagcaaacccgcttcaaaggccggcataacgtcatgctggctttcaaaaacaaccgctggcgcttcaatcacctggttctcaaccggcacggcagaggttttcataaccgcacggcccaggttaccgcttaacacttttgtcccaccatgatgagagaaaggttgttcgaaggaagcgatcacattgctgtcgagtgatttttccgccccttcccgccagtccagttcaccattattcagccatggttcaagggtataacgagacagaccaaaacctgccaccgtattgacatcttcatgcagcaggcctgctttgagcagttcacgcaccagaaccggtacgccacctgccgcctggaagtggttaatatcggccggaccgttcgggtagagacgtgccatcagcggtacaacatcagaaaggtcagagaagtcatcccagttaatctgaataccggccgcgcgcgccatcgccaccaggtgcatggtgtggttagtggaaccaccggtcgccagcagtgcaacgataccgttcaccaccactttctcatcgatcatcttaccgatcggcatccattcattaccattaccggtcatgcgtgtaacctgacgcgcagctgcggcggtcaaagcatcgcgcagcggagaatccggatgaacaaaagaagagcctggcaactgcatccccataaactccaccaccatctggttggtgttggcagtaccgtagaaagtacatgttcccggcgcatggtaagacgcggcttctgactccagtaaggccatgcggtccactttaccttcggcataaagctggcgaatacgcactttttctttatttggcaaaccgcttgccatcggtccagacggcacaaacaccgcaggcaaatgaccaaacgacagggctgccatcgtcagacccgggacaatcttgtcgcacacaccgaggaacagagcaccatcaaacatgttatgggacagccccaccgccgcagacatcgctatcacttcgcggcttagcagcgacaattccattccatcctgcccctgggtgacaccatcacacatcgccggaacaccgcccgcaacctgaccaaccgcattcgcttcatgcagggctttacgaatgatttctggatagtgttcataaggctggtgcgcggagagcatgtcgttataggaggtgatgatggcgatattgttacgcaacatgcttttcaaagaggctttgtcttctggctggcaggcagcgaaaccgtgtgccaggttaccgcatgccaactgcgaacgatgaacggtcgaagttttcgcttgttctatccgggcgagataagcagagcgagtctcgcgcgaacgttcaatgattcgatttgttacgcgtaacaattgtggattcataaaggctcctgaaattgagttgtcagagcaggatgattcacaacgcgtttcattcagaggatttatgactgaaacgcctgtaaccggagctcatagggcaaaaacgtttcagtcagtgtaataaaaaaagcctcgtgggtgaatccgcacgaggcctgaaagtgtaaaaattgttctacaatctgcgcaagatcatgttaccggtaaaataaccataaaggataagcgcagatattactcaaactcattccaggaacgaccatcacgggtaatcatcgccaccgaggcaacgggtccccaggttccggcctgatacggtttcggcgcatcattgtccatcgcccacgcctcagtaatggagtctacccatttccaggcttcttccacttcgtcgcgacgtacaaacagtgcctgaataccacgcatggtttccagcagcaaacgttcataggcatccgccagatgcgtctgattaaaggtttctgaatagctcagatccagcttggtgatttgcaggttatgtttgtggtcaaggccaggaactttattcagtacctggatatccacgccttcatcaggttgcagacggatagtcagtttattctgcggcagatcctgccacgattctttaaacagattcagttcaggtgttttgaaatagaccacgacttcagaacatttggtcggcagacgtttaccagtacgcaggtagaatggcacaccggcccagcgccagttatcaatgtcgacgcggatcgccacgaaagtttctgtattgctgctcttgttcgcgccctcttcttccagatatcccggcacttttttgccctgggcgaagcccgcagtatattgcccgcgtacggttttttcgcgtacgttggagcggtcgatgcggcgcagagacttcagtactttcactttttcatcgcggatgctgtctgcgctcaggtcagacggcggagacatcgcaatcatgcaaagaatttgcagcaggtggttctggatcatgtcgcgcatctgaccggctttatcaaaatagccccagcgcccttcgatccccacttcttctgccacggtaatctcaacatgatcaatggtgcgattgtcccagttattcacaaacagggagttagcaaaacgcagcgccaacaggttcagcaccgtttctttaccaagatagtggtcgatacggtaaacctggcactcctcgaagtattcgccaacctgatcattgatttcctgcgaggtcgccagcgacgtccccagcggtttctccatgactacgcgtgccggtttagcattcagttttgcctcgccaagccctttgcaaattgcgccaaaagtgctgggcggcatggcaaagtagttaatggtgatacgatttttttgatccagcatcgcgccgagacggctgaatgcagcagtgtcattgacatcgagattacaaaaatccagacgtgcactcagggtgtcccataaaccttcatcaatggtttctttcatgaaagtttcgagcgcctcgcggacaactttggtatatgccgctttatcccagtcagcacgccctacgccgataatccgggtgtccgggttgagctgaccggctttttccagttgatacagggaaggcagcaatttacgacgcgcaaggtcgcctttcgcgccgaaaatgaccaggtcacaggcctgggctgtttgcgttaccgccatgtcattctccttaagttaactaacccggtacttaagccagggtatacttgtaattttcttacggtgcactgtactgcttttacgagcttgcgaaaactgtaaacgcttatccacccgtgcgattacgggaaaagcgcgcaaagtgcggcaaaactgataaaaaaatcatcgttttccattgggtaaaaatctgacactgatcatgttatgaaaaaaaataacaacttttttatctgcttttgtcattaacacggcacacaggcgtaatatctgacaaaactgcatttcgatttctttcagtgcggaaatcgtcattacccgtgagtctctttacatcatgaatatgctggaaaaaatccagtctcagctggaacatttgagcaaatcagagcgcaaagttgccgaggtcattctggcttcgcccgataacgcgatccattcgagtattgctgctatggcactggaagccaatgttagcgaaccgacggtgaatcgtttctgtcgcagcatggacacgcgcggttttcctgattttaaacttcatctggcacagagtctggcgaatggcactccctatgttaatcgcaatgtcaatgaagatgacagcgttgaatcatacacagggaaaatatttgagtccgcaatggcaacgcttgatcatgtccgtcattcactggataaatctgccatcaaccgcgccgtcgacttgctcactcaggcaaaaaaaatcgcctttttcggattaggctcttcagccgccgttgcccacgatgcgatgaataagttctttcgttttaatgttccggtggtgtactccgatgatatcgtgctgcaacgcatgagttgtatgaattgtagcgacggagacgtggtggtgctgatttctcacactggaagaacaaaaaatctggtcgagctggcgcagctggcacgcgaaaacgacgccatggtgattgccctcacctctgcgggtaccccgctcgcccgggaagcaacgctggcaattaccctcgacgtaccggaagatactgacatttatatgcccatggtttctcgacttgcacagctgaccgtgatagatgtgctggcgacaggatttactttgcgacgcggtgcaaaattcagagataacttgaagcgggtcaaagaagcgctgaaggaatcgcgttttgataagcagttacttaatttaagtgacgatcgctaaaaacgactgtcactgtcctaatcttatacgacatccgaatgagattaatttatcgccatcgcggcgttatttcattcggatttcatgttcaagcaacacctggttgtttcagtcaacggagtattacatgtccagaaggcttcgcagaacaaaaatcgttaccacgttaggcccagcaacagatcgcgataataatcttgaaaaagttatcgcggcgggtgccaacgttgtacgtatgaacttttctcacggctcgcctgaagatcacaaaatgcgcgcggataaagttcgtgagattgccgcaaaactggggcgtcatgtggctattctgggtgacctccaggggcccaaaatccgtgtatccacctttaaagaaggcaaagttttcctcaatattggggataaattcctgctcgacgccaacctgggtaaaggtgaaggcgacaaagaaaaagtcggtatcgactacaaaggcctgcctgctgacgtcgtgcctggtgacatcctgctgctggacgatggtcgcgtccagttaaaagtactggaagttcagggcatgaaagtgttcaccgaagtcaccgtcggtggtcccctctccaacaataaaggtatcaacaaacttggcggcggtttgtcggctgaagcgctgaccgaaaaagacaaagcagacattaagactgcggcgttgattggcgtagattacctggctgtctccttcccacgctgtggcgaagatctgaactatgcccgtcgcctggcacgcgatgcaggatgtgatgcgaaaattgttgccaaggttgaacgtgcggaagccgtttgcagccaggatgcaatggatgacatcatcctcgcctctgacgtggtaatggttgcacgtggcgacctcggtgtggaaattggcgacccggaactggtcggcattcagaaagcgttgatccgtcgtgcgcgtcagctaaaccgagcggtaatcacggcgacccagatgatggagtcaatgattactaacccgatgccgacgcgtgcagaagtcatggacgtagcaaacgccgttctggatggtactgacgctgtgatgctgtctgcagaaactgccgctgggcagtatccgtcagaaaccgttgcagccatggcgcgcgtttgcctgggtgcggaaaaaatcccgagcatcaacgtttctaaacaccgtctggacgttcagttcgacaatgtggaagaagctattgccatgtcagcaatgtacgcagctaaccacctgaaaggcgttacggcgatcatcaccatgaccgaatcgggtcgtaccgcgctgatgacctcccgtatcagctctggtctgccaattttcgccatgtcgcgccatgaacgtacgctgaacctgactgctctctatcgtggcgttacgccggtgcactttgatagcgctaatgacggcgtagcagctgccagcgaagcggttaatctgctgcgcgataaaggttacttgatgtctggtgacctggtgattgtcacccagggcgacgtgatgagtaccgtgggttctactaataccacgcgtattttaacggtagagtaagtacgttgccggatgcggcgaaaacgccacatccggcctacagttcaatgatagttcaacagatttcgaatattctgaagcaaacttgaacttatcatcaggcgaaggcctctcctcgcgagaggcttttttatttgatgggataaagatctttgcgcttatacggctggatttcgcccggtttgcgagttttcagcaattttagtatccaggtgtattgttctggtcgcggaccaacaaaaatctcgacttcttcattcatccgccgcgcaatcgtatgatcatccgcctctaacagatcatccatcggtgggcgcacctgaatcgtcagacgatgcgtcttgccatcataaatcggaaacagcggtacaacgcgcgcacggcacactttcatcaaacgaccaatcgcgggcaacgtcgctttataggtggcaaagaaatccacaaattcgctgtgctctgggccatgatcctgatcgggtaaataatatccccagtacccctgacgtaccgactggatgaatggtttaataccgtcatttctcgcatgcagacgaccgccaaagcgacgacgcaccgtgttccagacataatcaaaaaccgggttgccctgattatggaacatcgctgccattttctgcccttgcgaggccatcagcatggcaggaatatcgacggcccaaccgtgcggcaccagaaagataactttctcgttattacgccgcatctcttcgatgatctccagcccttgccagtcaacgcgcggctgaattttctccggcccgcgtattgccaactcagccatcattgccatcgcttgcggcgcggtggcaaacatctcatcaacaatcgcttcgcgttcagcttcactacgttctggaaagcagagcgacagattgattaacgcacgacggcgtgagctttttcccagtcgtccggcaaaacgtcccagccgtgccagaatgggatcacggaactttggcggcgttaaagcgatacccgccatcgctgctacgcccagccatgctccccagtagcgcgggtggcgaaaggatttatcaaactcaggaatgtattcgctattattttttttcgtttccatgcttttccagtttcggataaggcaaaaatcaatctggtgatagtgtagcggcgcaacttgccccgcaccaaataaaaaaagccggtactgactgcgtaccggctgcgaatggatgttaattaatcaaaccgtagctgcggcacaatctctttggcctgcgccaggaattcgcgacgatcggagccggtcagcccttcggtacgcggcagttttgccgtcagcgggtttacggcctgctggtttatccatacttcatagtgcagatgcggcccggttgaacgtccggtattaccggaaagcgcgatacggtcgccacgtttcaccttctgtcccggtttcaccagaatcttgcgcaagtgcatataacgcgtggtgtagctgcgaccatgacgaatagccacataataacctgctgcgccactgcgtttggcaaccaccacttcaccgtcacccactgaaagcactggcgtaccctgcggcatggcgaaatcaacacctctgtgtggtgcaacgcgaccggtcaccggattagtacgacgcgggttaaaattagacgagatacggaactgtttcgccgtcgggaatcgcaagaatcctttcgccagaccagtaccgttacgatcgtagaatttgccatcttcagcgcggatagcgtaataatctttaccttctgaacgcaaacgtacgcccagcagctggctttgctcacgtttaccatcaagcatttctcgagacattaacaccgcaaattcatcgccttttttcagtttgcggaaatccatttgccactgcatggctttaatcactgcgctcacttcggcgctggttaaaccggcgtttctggcgctggcaacaaagcttcccccgacggtacctttcagcagattgttaacccactctccttgctgcatttcgctggtcattttaaaaccgttagcggcagtacggtcataggttcgggtttcacgacgagacacttcccaggtgaggcgctgcagttcgccgtccgcggttaatgtccaggagagttgttgaccgattttcaggttacgcaattctttgtcggccgcagccagttgggtgatatcacccatatcaataccatactgattgagaatgctgcttagcgtatcgccagtggaaacaacatattcatgcacgcccgcttcaccggcgattttgtcatccagttcgtcctggggaatggcttcatcttcttgtgcagcttgatcaatcggctcactggcttcaggtaagagcgaacgaatttcgttctgttccagctcaatggttttgacaattggcgtggcatcacggtgataaacataaggccgccagacagcgacggccagagtaagaacggtgagcgaccccaacataacgcggtgtggtcgcggtaaattattaaacgccagggcgacagagcgggctatctgttgcacgtaatcacttcctcattaatctcctttcaggcagctcgcatactggttggctaattgactcaggaattctgaatagcttgttttacccagtttgatattcgtccccaggggatccaacgttcccatacgaacggatgtccctcgtgcgacgctctcaacgaccgctggcctgaactgtggctcagcaaaaacgcaggttgctttttgctcaaccaactgtgttcttatttcatgtaaacgctgcgcgccaggttgaatctcagggttaacggtaaaatgaccaagcggtgtcagtccaaactgtttttcgaaatagccgtaagcatcgtgaaaaacgaaataacctttccccttgagcggcgcgagctcgttaccaacctgcgtttcggttgaggctaattgtgcctcaaaatccttcaggttggcgtcaagtttggctcgactttgcggcataagttccactaattttccatggattgcaaccgctgtagcccgcgctatctctggggaaagccaaagatgcatgttgaaatcgccgtgatggtgatcttcgtcacttttttccgcgtggtcgtgatcatcatcatcgccgtgaatacttttcatcagtagcggtttcacatcttcaagctgcgcaatcgttacctgcttcgctcctggtaatttgcttaccggtttttgcataaacgcttccatctccgggccaacccaaacgactaagtccgcgttctgtaagcgttttacatccgatgggcgcagtgaataatcatgttctgaagcgccgtcaggaagtaaaacctctgtttctgttaccccatcagcaatggcagaagcgatgaacccaacgggtttaagcgaagcgacaacggcggcatctgcggcctgtgttgcacctccccagagagcggcggataatgctgcgaaaagaagcgtttttttatgtaacataatgcgaccaataatcgtaatgaatatgagaagtgtgatattataacatttcatgactactgcaagactaaaattaacatgacaagtctggtttccctggaaaatgtctcggtttcttttggccaacgccgcgtcctctctgatgtgtcgctggaacttaaacctggaaaaattttgactttacttgggccaaatggcgcaggtaagtcgacactggtacgggtagtgctcgggctggtaacacccgatgaaggggttatcaagcgcaacggaaaactgcgcatcggctatgtaccgcagaagctgtatctcgacaccacgttgccactgaccgtaaaccgttttttacgcttacgccctggtacacataaagaagatattttgcctgcactgaaacgtgtccaggccgggcacctgattaacgcaccgatgcaaaagctctctggtggcgaaacgcagcgtgtactattagcgcgagcattgttaaatcgcccgcaattattagtgctggatgaacccactcaaggcgtggatgtaaatggccaggtggcgttatatgaccttattgaccaactgcgtcgtgaactggattgtggcgttttaatggtttctcacgatctgcatctggtgatggcaaaaaccgatgaagtgctgtgcctgaatcaccacatttgttgttccggcacaccggaagttgtttccctgcatccggagtttatttcaatgtttggtcctcgtggtgctgaacaactgggtatctatcgccatcatcataaccatcgtcacgatttacagggacgaattgttttgcgtcggggaaatgatcgctcatgattgaattattatttcccggttggttagccgggatcatgctcgcctgtgccgcgggtccgctgggttcgtttgtagtctggcgtcgtatgtcttatttcggtgatacgctggctcatgcctcattacttggcgtcgcgtttggtttgttgctggacgtgaatccattctatgcggtgattgccgttacgctgctgctggcgggcggtctggtatggctggagaagcgtccacagctggcgatcgacacgttattagggattatggcgcacagtgccctgtcgctgggcctggtggtcgtgagtctgatgtctaatattcgtgttgatttgatggcttacctgttcggtgatttgctggcagtgacgccagaagatctcatctctattgcgattggcgtggtcatcgtggtggctattttgttctggcaatggcgcaatttgctgtcaatgacgataagcccggatctggcgtttgttgatggtgtgaaattacagcgagtgaaattgttgttgatgctggtgacggcattgacgattggtgtagcgatgaaatttgtcggtgcgttgattattacttcgttgctgattattcctgctgctactgcgcgtcgctttgcccgcacgccggaacagatggctggtgtcgctgttttggtggggatggtggcagtgactggcggtttaaccttttccgcggtttacgatacgccggcgggtccgtcggtggtgctatgtgcggcactgttatttattctcagtatgatgaaaaagcaggccagctaatctatcgctgaacacatttgtcggatgcggcgcgagcgccttatccgacctacggttcggtatctctggtagtcctggtaagacgcgaacagcgtcgcatcaggcatattgccagtgccggatgcggcgcgagcgaccaatccgacttacggcatttctggcggcgttatgccaaagtgattccacgcccgcgtcgtcgccatacgcccacgcggtgtacgctgcaaaaagccttgctgaatcaaataaggttccagcacatcctcaatggtttcacgttcttcgccaatggctgccgccaggttatccagacctacaggtccaccaaagaacttatcgattaccgccagcaacaatttgcggtccatataatcgaaaccttcagcatcgacattcaacatatccagcgcctgagcagcgatatctgccgagatggtgccatcgtgcttcacttcggcgaaatcacgcactcgacgcagcagacggttggcaatgcgcggcgtaccgcgagcgcgacgagcaacttccagcgcgccgtcatcactcatctcaagccccataaagcgtgcgctgcgactgacgatatattgcagatccggcacctgataaaactccagacgttgcacaataccaaaacggtcgcgcaacggtgatgtcagcgaacctgcgcgcgtggttgcaccaatcagggtaaacggcggcaaatcaattttaatggagcgtgccgccggaccttcaccaatcatgatatccagttggtagtcttccattgccgggtacagcacttcttcaacaactggcgatagacggtggatctcatcaataaacagcacgtcatgcggttcaaggttagtgagcatcgcagccaaatcgcccgccttttccagcaccggaccagaagtcgtgcgtaaattaacgcccatttcattggcgacaatgttggcaagcgtagttttacccaaccccggaggaccaaaaatcaacaaatgatcgagggcatcgccgcgcagtttcgctgctttgatgaaaatctccatctgtgaacgaacctgcggctgaccaacatactcttccagtaatttggggcgaatggcgcgatctgctacatcttccggcaaagtggtaccggcagaaatcagacggtctgcttcaatcatcctttacctcataacgcggcgcgtagggcttcgcgaattaaagtttcactgctggcgtcagggcgagcgattttgctcaccatgcggcttgcttcttgtggtttatagcccagcgccaccagcgcggcaaccgcttcttgttcagcatcgtcggtcgccgggctggcaggagacgtgagtaccaggtcggcggctggcgtaaagagatcgccatgcaaacctttaaatcggtctttcatttcaacaatcaagcgttcggcggtttttttgccaatacccggcagtttcaccagtgcccccacttcttcacgctcaacggcattaacgaactgctgcgctgacattccggagaggatcgccagcgccaacttcgggccgacgccgttggttttgatcaactctttgaacaatgtgcgctcttgtttattgttaaaaccgtacagcagttgcgcgtcttcacgcaccacaaagtgggtgaaaacgatcgcttcctgacccgcttcagggagttcataaaaacaggtcatcggcatatgcacttcatagcctacgccgcccacttcaattaacaccagcgggggttgtttttcaatgatgatgcctctgagtctgcctatcacatgacgctcctgcgtaatgaatcaaagataatgctgtatgataaaaaaatgctggatagatatccagcgaaggatgaagaaaacttgcgaggtgtctcgatgaactgaaaaatggcacagtataatttattctacaggttatattggaagcaaatattttaatattacatattcagtgaagaaatgcgtaataaaaatatacattgcgcctcctgaaaaaataaattttttatgctattacgtatatttgtatctatttcaatggaatgacaacgtgaatattaattaccctgctgaatatgaaattggagatatcgtctttacatgtataggtgctgccttatttggtcaaatatcagctgcatcaaattgctggagtaatcacgtcgggatcattatcggtcataacggtgaagacttcctggttgcagaaagccgggttcccctttcaaccatcaccacgctatctcgttttattaaacgttcgtctaatcaacgctatgctataaagcgattagacgctgggctgacagaacgacaaaaacaacgaattgttgaacaggttccctcccggctacgcaaactttaccacaccggttttaaatacgaatcttcgcgccagttctgttcaaaatttgtttttgatatttataaagaagcgctatgtattccggtgggtgaaatagagacgtttggagaattgttaaatagcaatccgaatgcaaaactcactttctggaaattctggttcctgggttctattccgtgggagcgtaaaaccgtcacgccagccagtttgtggcatcatccgggtttggtgttgattcatgcggagggagtggaaacgcctcagccggaactgaccgaggcggtataacttaacgcagtcgccctctcgccaggttcagccgcgattcgctcatctgcatcgcattctgactaacgtggcagtgggtgatagcaatcgccagcgcatcggcggcatccgcctgtggattagcgggcagtttcagcaaggtgcggaccatatgctgcacctggcttttttcggcactgccaatacctaccaccgtttgctttacctgacgtgccgcgtattcaaatactggcaactcctgattcaccgccgccacaatcgccacgccgcgcgcctggcccagtttcagggctgagtcagcgttctttgccataaagacttgttcaatggcgaaataatcaggctggaactgggtgatgatttccgtcacgcccgcatagatgagtttcagacgagacggtaaatcatccactttggtgcggatgcatccgctacccaggtaggacagttgcctacctacctggcggatgacgccgtagccggtcacgcgcgaacccggatcaatgccgagaataatagccatcacgcgtctccgttttgctgtttagcaggcctcatcagagagtcgctgcgacctcatcagagatttcaccgttatggtaaacttcctgcacgtcgtcgcaatcttccagcatatcgatcagacgcatcagtttcggtgcggtttctgcatccatatcagctttggtagacgggatcatggaaacttccgcgctgtctgctttcagacctgccgcttccagagcgtcgcgcactttacccatttcttcccatgcagtgtagacatcaatcgcgccgtcatcataggtcacaacgtcttcagcacctgcttccagtgctgcttccatgatggtgtcttcatcgcctttctcgaaggagatcacgccttttttgctgaacagataggcaacggaaccatcagtaccgaggttaccgccacatttgctaaatgcatgacgcacttcagcaacggtacggttgcggttgtcagacagacattcaatcatgattgccgtgccgccaggaccgtaaccttcgtagatgatggtttccatgtttgcatcatcatcaccgcccacaccacgtgcaattgcgcggttcagtgtgtcacgggtcatgttgttagacagtgctttatccaccgccgcacgcagacgcgggttagcgtccggatcgccaccgcccagcttagccgcggttaccagctcacgaatgattttagtgaagattttaccgcgcttagcatcctgcgcagctttacgatgtctggtgttggcccatttactatgacctgccataaaaatatctccagatagccctgcctgttcaggcagcgttaattacaaactgttcaatcgcctgccggttgctccaggacttagtgagcgccgccgcagcaggcgcatcaagccacttgtaagccagatgttcagtgaaaacgatctgccgctcgtgcggaagcgcaagacagaaccatgattccgtattacgcgtcacgcccggcgcatagcgatgacgtaaatgtgaaaaaatttcaaactctaccgtgcgctgacagtcaattaaggtcagttgttcagcgacaacatcaatggtgacctcttcctttacttcgcgcatggcagcttgcggcgcggtttcaccctcttccacgctgccggttaccgactgccagaaatcgggatcgtcacgccgctgcaacatcagcacccgtttcgtatcttgtgcgtagatgaccactaagatcgaaacgggacgcttatacactttatccttcacgctgcctcttcgttgactgccttcgctcatcccattcacatagttatctatgctcatgggagttcactcagttgccgcctcgatgcaacgcgaatgatttcgtgtatttgagtcatatcagttattctcagccttcttcacaacctgaatgctcagctcagccagtgcagtcgggttagcaaagctcggtgcttcagtcatcagacacgctgccgccgtggttttcgggaaggcgataacgtcacggatattgtcggtgccggtcagcagcatggtcagacggtcaagaccgaatgccagacctgcgtgcggcggagtaccgtatttcagagcgtcgagcaggaagccgaatttctcgcgctgttcctcttcgttgatacccagaataccaaacaccgtctgctgcatatcaccattatggatacgtactgaaccaccgcccacttcgtaaccattgatgaccatatcgtaagcgttcgccaccgcattttccggtgcagctttcagttctgcagccgtcatatctttcggtgaggtgaacggatggtgcattgccgtcaggccgccttcaccgtcgtcttcaaacatcgggaagtcgataacccacagcggtgcccatttgctttcgtcggtcagaccaaggtctttacccactttcaggcgcagtgcacccatcgcgtcggcaacaattttcttgttgtcggcaccgaagaaaatcatatcgccatcttgcgcggcagtacgatccaggatgtcttcgatgatttctgcattaaggaacttcgctaccgggctgttgataccttccagacctttcgcgcgttcgttaactttgatgtaagccagacctttcgcgccgtagattttaacgaagttaccgtattcgtcgatctgcttacgggtcagcgatgcgccgcccggaacgcgcagagccgctacgcgacctttcggatcgttcgccggacctgcaaatacagcaaactcaacagatttcagcagatcagcaacgtcagtcagttccatcgggttacgcagatccggtttatcagaaccataacggcgttctgcttccgcaaaggtcattaccgggaaatcgcccagatccacacccttcacttccagccacagatgacgcaccagcgcttccatcacttcacgcacttgcggcgcggtcatgaaagaagtttccacatcgatctgagtaaattcaggctgacggtcagcacgcaggtcttcgtcacggaagcatttaacgatctgatagtaacggtcaaaaccggacatcatcagcagctgtttgaacaactgcggggattgcggcagtgcgtagaatttacctttgtgcacacgagaaggcaccaggtagtcacgcgcgccttccggcgtggctttggtcagcatcggagtttcgatgtcgaggaagccgtggtcatccataaaacggcgcaccaggctggtgattttagcgcgggttttcaggcgctgagccatttccggacgacgcaggtcgaggtagcggtatttcagacgcgcttcttcggtgttgacgtggttagagtcaagcggcagaacatctgcgcggttgatgatagtcagcgaggacgccagcacttcgatttcgccggtcgccatatcgcggttaatatttttttcgtcacgcgcacgtacggtgcccgtgacctgaatgcagaactcattacgcagttcagaggccagctttaacgcgtccgcacgatccggatcgaaaaatacctgcacgataccttcgcggtcgcgcatatcgatgaagatcaggctaccaagatcacgacgacggttgacccaaccacacagagtcacctgctgccccacgtgggacaaacggagctgtccacaatattctgtacgcatgagatatcccttaacttagctgccggcggatgccccctgctgcgcaggtgaccaagtcgcagcgttagctgtatgtcacaactgaatgaaaaaaggcggctattatactggaaattctgccgcaccgtaagagcctggcccgcgctggaacgcctcgttaccactttatatcgggcctgaaatcagactctacgccagtttgctataaaggtgttgcccgaactcataaaaattaacaaaatttgtcgttccgccatcggctaatcgcattaaggtgtgaggcacgattttgttttttcaggagtcattatgcttgaacttaatgctaaaaccactgcgctggtggtgatcgatttacaagaaggcatcttaccttttgccggtggtccacatactgccgatgaggtagttaatcgcgccgggaagctggcggcgaaatttcgcgccagcggtcagcccgtgtttctggtgcgcgttggctggtctgccgattacgctgaagcattaaaacagccggtcgatgcgccctcaccggctaaagtgttgcccgaaaattggtggcaacatcctgctgcattaggtgcaaccgacagcgatatcgaaatcatcaaacgtcaatggggtgcgttttacggtacggatctggagttgcaattacgccgccgaggtatcgatacaatagtgttatgtgggatctcgaccaatatcggtgttgaatccaccgcccgcaatgcctgggaacttggctttaatctggtgattgccgaagacgcctgtagtgccgccagcgccgagcagcacaataacagtatcaaccatatctacccgcgcatcgcccgtgtgcgtagcgtggaagagatcctcaacgcgttatgatttacatcggtctaccgcaatggtcgcatcctaaatgggtgcggttggggatcaccagccttgaagagtatgcccgccactttaactgcgtggagggcaacaccacgctttacgccctgccgaaacccgaggttgtcctgcgctggcgtgagcagaccacagatgacttccgcttctgttttaagtttccggcgaccatttcgcatcaggcagcattacggcattgcgatgatttagtgactgaatttttgacccgcatgtcaccgttggctccgcgcattgggcaatactggctgcaactgcctgccacattcggcccacgggagctgcctgcgctttggcattttctcgattctcttcctggcgaatttaattatggcgtggaagtccgccatccacagtttttcgccaaaggagaagaggaacaaacgcttaatcgcggtttacatcagcgcggcgttaatcgggtgattttagacagccgcccggttcatgcagcacgtccacacagtgaagctattcgcgacgctcaacgaaaaaaacctaaagttccggtacatgctgtactgacggcgacaaatccgctgatccgttttatcggtagtgatgatatgacgcaaaaccgggaattatttcaggtctggttacaaaaattagcgcagtggcatcagaccactacgccttatctttttttacatacgccagacattgcccaggcaccggaactggtacataccctgtgggaagacttacgtaaaacgcttccagagatcggagcagttccggctattccacagcaatcttctcttttctgaatttgccacctatcatagacaggtgccatcggccattttaaagggagtttgtatggtaagcgcgctgtacgccgttttaagtgcgttgttattaatgaagttctcttttgatgtcgttcgcctgcgaatgcagtaccgcgttgcctatggcgacggcggttttagcgaactgcaaagcgctattcgcattcatggtaacgcggtggaatatattcccatcgcgattgtgctgatgctgtttatggaaatgaatggcgcagaaacctggatggtgcatatttgcggcatcgttttgcttgctggtcgtctgatgcattattacggttttcatcaccgtctgttccgctggcgacgttccggcatgagcgccacctggtgtgcgctgttgctgatggtgctggcgaatctttggtatatgccctgggagttggttttctccctgcgttagcgcacaatacgccactttctttttcccggatttttacgttatgtctcaccgcgacacgctattttctgcccctatcgccagactgggcgactggacctttgatgaacgggtagctgaagtcttcccggatatgatccagcgttccgtacccggctattccaatattatttccatgattggtatgttagccgagcgcttcgttcaacctggtacgcaggtttacgatctgggttgttctctgggcgcggcgacgctctcggtgcgtcgcaacattcatcatgataattgcaaaattattgccatcgacaactccccggcgatgattgaacgctgccgtcgtcatattgacgcctataaagcccctacgccagtagacgtcattgaaggtgatattcgcgatatcgccattgaaaacgcatcgatggtggtgctgaattttaccctgcaattcctggaaccttccgagcgccaggcgttactggataaaatttatcaagggctgaaccccggcggcgcgctggtgctttcggaaaaattcagtttcgaagatgccaaagttggtgaactgttgttcaacatgcaccacgactttaaacgtgccaacggttacagcgaactggagatcagccagaagcgcagcatgctggaaaacgtgatgctgaccgattccgtggaaacccataaagcacgcctgcataacgccggttttgagcatagtgagctgtggttccagtgctttaactttggttcactggtggcattaaaagcagaggacgctgcatgatcgactttggtaacttttattctctgattgccaaaaatcatctttcacactggctcgaaacgctgcccgcgcagattgctaactggcagcgcgagcagcagcacgggttgtttaagcagtggtcaaatgcggtggagtttctacctgaaattaaaccgtatcgtcttgatttattgcatagcgttacggcagaaagcgaagagccactgagcgcagggcaaattaaacgcattgaaacgctgatgcgcaacctgatgccgtggcgcaaagggccgttctcactgtatggcgtcaacatcgataccgaatggcgttccgactggaaatgggatcgtgttctgccccatctttctgatttaaccggacgcaccattctggatgtcggctgcggcagcggttatcacatgtggcgcatgattggcgcaggcgcgcacctcgcggtggggatcgaccctacgcaactgtttctgtgccagtttgaagcggtgcgtaaactactgggtaatgatcagcgcgcgcatttgttaccgttaggtattgaacaacttccggcactgaaagcctttgataccgtcttttcgatgggcgtgctttaccatcgccgttcaccgctggagcatctatggcagttgaaagatcaactggtcaatgaaggtgaactggtgctggaaacgctggttattgatggtgatgagaacacggtgctggtaccaggcgatcgttacgcgcaaatgcgtaatgtctatttcatcccttccgcgctggcgctgaaaaactggctgaagaagtgtggttttgtagatatccgcattgcggatgtgagcgttaccaccacagaagagcagcgacgcaccgaatggatggttaccgaatcgctggccgatttcctcgacccacatgatccgggtaaaacggtggaaggttatccggcacctaaacgcgcggtgctgattgcgcgcaagccgtaaaggtctggtattactgccggatgcggcgtgaacgccttatccggcctacaaaaccttgctaattcaatatattgcagggactatgtaggcctgataagcatagcgcatcaggcagctttacgtttgcataacctcagcgcccgtttccgggcgctattcacgtcttacgcctgaacagctggctgatcaaacgccgttaacttcggtgcattgcccgtatatttttcgatatacaccaacgctgagttaccggcacaggcatttgccagctgcgagctggggatatccgccgttaacacgttcgcactgccgtttttacacaagccattttccagatctggccatgcaccttcatgcacgcataccacgccttttttgatcccgtcagtcaccaccgcgcctgtcaaaatctgaccacgtttgttccagacacgcaccagatcgccattcgcaataccaaagcgtgcagcatcttcggtgtgaatagtgattggttcacgatcggcgatcgcatattttttacgcagttccgcatagttaagctgactgtgtaaacggtgtgccggatgtgcggtcagaagctgtaactgcttctcgtcggcggtacctttccattcatcaggagccagccaggttgggtgtgccgggcaatccttatagccaaatttttccaacgtttttgaatagatttcaattttgccgcttggcgtacccagcgcatttttcaccggatcggcgcggaaatcaccataacgaacgtactgttcgttcttctcgctgtggcgcatttcgatcagtttattttgctgccagaaggcattaaacattggcatagtgacgcgttgcgcacgggcacctttctgagcggcatcatagaaaaatttcagccacgccatttcatctttaccttcggtatagatctcttttccgccaggtttgagtaattccgcaagatcggcaaacacgtcaaaatcgttacgcgcttcaaattgcggagcaacagcctgcttcatcggcacaatatgctggttgctgtaatcaccggtcatcgtcaagtcattgcgctcaaacgatgtggtgatcggtaatacgatatctgcgtgtttggctgctgcggtccagtagcattcagaaacgacgatcatctccggtttctgccatgctttaatcagacgattagtatcctggtgatgggtaaagttaccgccacccgcccaccagatcattttgatattcggatacgtttgttctttaccgttatgctgatatttgccgccaggattttccagcgcatcgacgatacgggcaacaggaatcgccgtcattccgccatcatcagcggcctcgctggcatgtccggcaatcgccgcagacatttccggcagcacgccgccaacacgcgtcgggttgccaccgttggagtaatgataagagaaaccaaaaccgccgcccggtgtaccaatctgccctaacatcgccgccagcgtcaccagcatccagtgtttctgttcaccatattgctggcgctgaattccccagcctgccatcagcattgtgcgattcgccgccatcagttcagcgagtttgactatctgcgcttccggtacgccagtaatttccgccgcccagaccgcgctcttcggcgtattatcgctcttacctgtcagatactcttcaaactgcggatacccggtagtgtatttttcaaggaacactttatcgtgtttgccttgtgtcatcagggtatgcgcaatccctaacatcagtgccacgtcggtgcccatattcggcgcgatccaggtggcattatcgtcaaagaattcgatggtttcggagcggataggatcaatggcaatcactggtttgccagattttttcagctgatggaagtattccagcccttgctcatcggtactgctccaggcaatttttaaggtattcagcgggttcattccccacagcaccacaacctggctgttttccagaatcagcggccaggaggtctgctgttcatacacctctacagaaccgaccacatgcggcatgatcacctgtgctgccccggttgaataatcgccgctatgcccggaataaccgcccgccaggttcatataacgttgcagtaaggtttgcgctttatgcaacacgccagaagagcgccagccgtaagatccggcaaaaatggccgatggtccgttagctttacgaatacgatcatgttgctcatgaatcagttttaatgcctgttcccagctcacctgtacataggtatcttcgccacgacctttcgccggttgcagtggattatcgagatagctttttctcaccatcggatgctgaatacgcgccgtggtgtgtacctgatccgccgccgtagactgtaaggaattcggtatggttttcgccagcgcgcctgttgaagaaacaatcttgccgtccttcacttctacgttcatcgctccccaacgtcccgcggtgaggattttaccgcccttctcttctgcccatgcggggagcggtgctgccgatgtcaccaccagcgctccagcggcaataccgctgtgtttaataaattcacgtcttgttaatgtcataacttcctccctgatcaacgaggatcactgtttctcggtaatatctttggcgttgtactggaaataccgcgttaaaatgtccagttcgttttcgctcatgctggttcgtgcccccattcctttggcaatggacggccacgcattgacggtgtaatggtcggcggcaataggggcatgacaaccagcgcaataggtatcgtcaagtttttcagcgtattgccatagcggtttacggtccgctaatgcgggatcggtaagcgcaccctgtaaagacgcctgacgccattgattgccgtattcgtcagcctgccattccccgtttacagtgagcgccttgataccttcttcacttaatgtggctagcgccagccgttgacctgccgccaggtagagcgtgttttcactgccctgcatttgataaccctgcaacagaacgatcggctgtttgccactggcatcaacgacggtgagatcggttccaggattcacggtagccagctcgcctatgtgagaagttttgaaaggataaatatgtgcgccattagtaactgaagtagcggcctgactttccagctcatgcgccgcgttgtcatccatttttatttctggcggaaaatgggcaatgcctttatgacaatcgatacaggtttcgctgtccttttgtgctttgttatgcattttctgcgcagattcactttgcgaggcaatatccatggcatcaaaagaatggcaactacggcacgttgcagagtcagtggcttttaattctttccatactgtttcggccatttcctggcgatgagcttcgaacttatcgtcactgtctattttgccgctaacaaattcatgataaatatctttagatgcctttaatttagcaaataaataatccatccctgactttggaatatggcaatcggcacattccgcacgtatccctttctggttcgaaaagtggacagttccctgatattcctcaaaaggtttactcatcgagtggcaggaaaggcaaaatgctgtatccgacgttttatgtaagactttttgcgccagcaataacccgccgccaccaaccacaaccgctatcagcaaaaacaataacccaatgcgttttttccctcgcatagattcctctaattaaattactggacaccgaaatcattgtataattaaatatacaacgaattaaccgcttgcataattaggcacaacactgcctgaaacaatcgataaagaatatgatttattacaatgtaatcattaattgctaaggaataacccagttgctatttagaatatatatttatcagttttagtaatttaaatcccataattaatgtgaatatatacaatatttttagcacaacgctatgcgcactgtcacccgctcaacagatcacggttatcgttcgttttttatactgttcagggataaaaaaaggcccctgttgaaattgcaggggcctggtacgagcaagcatcatattgggcgacatgatgcaacggtaaaaatcatttggcctgatggcgttcaatgattcctttcatttcagcaaccgccgccccgtctacgatataacgcgaatactcgtccgcgtgttcatctgatgacatggacaatccttgattacgataacgcatcggtgaggcttgccacgctcccgcggagctatggacttccagcactccggcatcgaggaagtggtgcaggttttctgcacggactcctgctccggccataatgattggagcatcacgatgggcaataagttccataatttttgataaaccttgcagtgcgtctgatttttgccctgatgtcagtacccgggcaatgcccaattccgcaagattattgagtgtatataaagggttagcgcacatatcgaaggcgcgatgaaaagtcactgccagcggaccggcagcagccattattttttccattcgtggcatatcgacattcccgtcaacatcgagaacgcccgtcaccagtccaggaaaacctaattcgcggaccgtgcgcacatcctcaagaatggcggcaaactcaccgtcgctgtagcaaaaatcaccaccgcgtgggcgaattatcggatgcacagggatcgtcacccgctggcgcacggatttcagtacacccaacgacggcgttaagcccccctcttttggggctgcgcataattcaactctgtctgcgccgttttgctgcgccgttagtgcacattccatgctgtaacagcaaatttccagtaatgccatttttactccttaattacgccgactgctcgctggcaacgatctcttcaatggaccacggatgaaacttaatagttgttttgccatcggtgaccgccagcgtcggattcggtaatcgctcatgctcaccttttggcgaactggttttcactgagatccccggtaggctgagtccttcatcagaaagcaatgccagcgcacgggcattcagcgtttctggatcacccggcagaacgatttcaatatgttcccaaccttcgtgtgggtaacgtttttccccgggccacggtagctccacaatagaaaactgccagtgcgcaacctgtaccggttcatgcaatttaaacagacaaatcggtctgccattgatcatattttctgacaaaagctcgccacactgttcaaacccgcgacgccagcgttcagcagtggcgttttgatggcaacgcaaagaaatgtgatcggcagtcagcggagtgatattcaaccccagacggcgggaaagttcatctaatgcgtggataaatcgcggtaaatccgatgcaatatcctgcagctcgtcgatagattgccagttcgccataatcactcttcgtctttcagtaaaagcgttaatttaccctgttgccctgtgccaaccaaccgctgatttcacgccgcttctgatgcaatagtgaaaacggcaatacgccacgcgcacgttgctgacgaaaacagccatttgcagtatactcccgccctaatttctttaactggtgcgggcaatttttgctcgcttcatcaatgtaaggtattccggtgaatattcaggctcttctctcagaaaaagtccgtcaggccatgattgcggcaggcgcgcctgcggattgcgaaccgcaggttcgtcagtcagcaaaagttcagttcggcgactatcaggctaacggcatgatggcagttgctaaaaaactgggtatggcaccgcgacaattagcagagcaggtgctgactcatctggatcttaacggtatcgccagcaaagttgagatcgccggtccaggctttatcaacattttccttgatccggcattcctggctgaacatgttcagcaggcgctggcgtccgatcgtctcggtgttgctacgccagaaaaacagaccattgtggttgactactctgcgccaaacgtggcgaaagagatgcatgtcggtcacctgcgctctaccattattggtgacgcagcagtgcgtactctggagttcctcggtcacaaagtgattcgcgcaaaccacgtcggcgactggggcactcagttcggtatgctgattgcatggctggaaaagcagcagcaggaaaacgccggtgaaatggagctggctgaccttgaaggtttctaccgcgatgcgaaaaagcattacgatgaagatgaagagttcgccgagcgcgcacgtaactacgtggtaaaactgcaaagcggtgacgaatatttccgcgagatgtggcgcaaactggtcgacatcaccatgacgcagaaccagatcacctacgatcgtctcaacgtgacgctgacccgtgatgacgtgatgggcgaaagcctctacaacccgatgctgccaggaattgtggcggatctcaaagccaaaggtctggcagtagaaagcgaaggggcgaccgtcgtattccttgatgagtttaaaaacaaggaaggcgaaccgatgggcgtgatcattcagaagaaagatggcggctatctctacaccaccactgatatcgcctgtgcgaaatatcgttatgaaacactgcatgccgatcgcgtgctgtattacatcgactcccgtcagcatcaacacctgatgcaggcatgggcgatcgtccgtaaagcaggctatgtaccggaatccgtaccgctggaacaccacatgttcggcatgatgctgggtaaagacggcaaaccgttcaaaacccgcgcgggtggtacagtgaaactggccgatctgctggatgaagccctggaacgtgcacgccgtctggtggcagaaaagaacccggatatgccagccgacgagctggaaaaactggctaacgcggttggtattggtgcggtgaaatatgcggatctctccaaaaaccgcaccacggactacatcttcgactgggacaacatgctggcgtttgagggtaataccgcgccatacatgcagtatgcatacacgcgtgtattgtccgtgttccgtaaagcagaaattgacgaagagcaactggctgcagctccggttatcatccgtgaagatcgtgaagcgcaactggcagctcgcctgctgcagtttgaagaaaccctcaccgtggttgcccgtgaaggcacgccgcatgtaatgtgtgcttacctgtacgatctggccggtctgttctctggcttctacgagcactgcccgatcctcagcgcagaaaacgaagaagtgcgtaacagccgtctaaaactggcacaactgacggcgaagacgctgaagctgggtctggatacgctgggtattgagactgtagagcgtatgtaatcgatttttcgtgagagtgaagcctgatcagggttagccgatcaggcttttttattgccatctaaatgtattctgaaaatggacatgccattgttttctcactgttggataagaggccagaagcgtaatatccggccccagggaaacgataacggttgaatttaaggaataccgcagtgtttaaatttcttgtattaacattaggcattatctcttgccaggcttacgcagaagatacggttatagtaaacgaccatgacatttcagccatcaaagattgttggcaaaaaaattcagatgatgatactgacgttaacgtgatcaaatcatgcctgcgacaagaatacaatctcgtcgatgcgcaattaaataaagcctatggtgaagcttatcgttatatagaacaagtgccacgcacaggtgtaaaaaaacctgataccgaacaacttaacttgcttaaaaaatcacagcgagcctggctggattttagggacaaagaatgtgaattaatcctttcaaatgaggacgttcaggatttaagtgacccttattctgaatcagaatggctctcatgtatgatcatacagaccaatacgcgaactcgccagttgcagctataccgtaactctgaagatttttatccaagccctttgacaagaggataattcacatctttttggcatgttttgttgcaagctattcctgataaataattgcaacaagacatcgagcctttttcactgagttattaaacatactcgcgagcgcgtaatttttttgtccttcagcgataattcacaatcacttcattacgttgtacctttagcggtggaattaaccgcccaccgcctggcacttcccagataaatcgcaacggttctgctgccgctataccggaaaaggccacggtggttccgctctgcccctctaattcgacacaacgagattgcgaacacaagcgaacccgcagtcctgaaggtgtcgggccgataagctgataacgccacgctaccagcgtcatcaatcctgaagcaggttgtcgcgtagaaagaggcgcagacgacatcgactcaccgcgatgatttagcgtaattcctacactacttgcctgccacatcccctccccggcggcttgcaccagcagcggaaacaataatattgctaataaggttctcattatttgccgccaattgtcgccgtcatgcggatatgtcggttatcagacagttccagattcgacaggaccactaactgcggcaagctgcggcgcaggaagcgagacaataatggtcgcagcgcgtggttcaccaacaatactggcggcgcacccagcatctcctgacgggatagcgcttcctgagtttgcgccagtaaacgatccgccagccctggctccagtcctcccccgccctgcagcgcctgtagtaacaaacgttccagcggtgtatcgaggccaataacatggacttcatctttgccaggaaaccactgctgggtaatcgcccgtcccaacgccacgcgcacgacggcggttaattcatgtggatcgctttggatgggcgcatgttccgccagcgtttcgagaatggtgcgcatatcgcgaatcggtactttttcatcgaggagattttgcagcactttatgcagtgtggtgagcgtgacgacgccaggaacgagatcttccgtcagctttggcatctcctgggcgacgcgatccaacagctgttgcgcctcctgacgaccaaacagctctgcggcatgctggctaatgaggtggttaagatgcgttgctaccaccgtgctggcctcaaccactgtgtacccctgaatctgcgcctgttcttttagcgcactttcaatccagatagcattcaggccaaatgccggatcgacggtcgcctcaccaggtaacgtcccggcagcggttccagggttaatcgccagccagcgccccggataagcatcaccactgccaatctccacgcctttcatcaaaatgcgatagcgggcaggttgcagatccatattgtcgcgaatgtgcaccactggcggcagaaatcccatctcctgggcaaatttcttgcggatactgcgtatacggcccaacaactcaccatcctgctggaaatcgaccatcgggatcagtcgataacccacttccattcccagagaatcttccagttgtacatcgttccacgtcgcttcgacaacggtattattctctgccatttttaccggtttgggttcggcaggcgctttttgttcgcgtccgcgtatccaccaggccagcccgagcaatccggcagtgaacagcaaaaataccaggttcggcattccaggcaccaggccgagtaaaccgagcacggcggcgcttaacaacataacgcttgggttactgaaaagctgattcaccatctgctcgccaacatcctgatcggtgctgacacgcgtaacgatgacccccgcggcggtagaaatcaccagcgccggaatttgtgccaccagaccgtcgccaatggtcaatagcgtataactttccgccgcgtgtcccatgctcatgccatgttgcagcacgccgaccagcaacccgccgacaatgttaatgaccatgatgaggatcccggcgatggcatcgccgcgaacaaacttacttgccccgtccattgagccgtaaaaatcggcttcctgagtcacttcggagcggcgttttttcgcctcatcttcaccaatcaatccggcgttaaggtcggcgtcaatcgccatctgcttacccggcataccatcgagaacaaagcgcgcacccacttctgcgatacgcccggcacctttggtaatgaccataaagttgatgatcacgagaatgacaaacaccacgataccgatagcgaaattgccaccaacgaggaagtgaccgaacgcttcgaccaccttccctgccgccgccgcgccggtatgcccttccattaaaatgatacgggttgaagccacgttaagtgccagacgcaacagcgtggtaaacaacagaatggtcggaaacgcagcaaactcaagcgtgcgctgggtaaacatcgccaccagcaacaccatgatcgacaaggcaatattgaaggtaaacaacaggtcgagtatgaatgcgggcagtggcagcaccatcatcgacaagatcaacaggatcaaaatcggtccggcaaggatctgccattgtgtcgatttcaggtttgcgggcaggcgcagcatcgcggccagattactcatgggtcggtttctcgttaataaaatccagggcttccggcaccggaagatgagtaggttgtacagggcgctgtccaccagccagacgccagcgtttcagttgccagacccaggccagcacttccgccaccgcggcgtacagttgacccgggatttgttgaccaatctccgcatgtcgatacagcgctcgcgccagcggcggcgcttcaagcgtcgggacgttattttcagcgccaatttcacgaatgcgcagcgcgaccagccctgcacctttagcgaccactttcggtgcgctcattttgttttcgtcatactgcaacgctaccgaatagtgggtcgggttattgacaatgacatccgctttcggcacatcggccatcatccgacgccgtgcagcagctcgctgcatctgacggatccgccctttaacatgagggtcaccttcgctttgtttgaactcatcacgaatatcctgccgtgacatacgcagctttttcaggtggctgaatatttggaaaaagacgtcaaatcccaccattggaatgacaccaagcaccaccagcagtgcgcatagccctaccaaatccatcgcattacccatggcggtaatcggagactcggccatcaagcgcatcatctgcggccagtgatgccagagaaaaaaccccgtcacgctgccaaccaggatggttttcaaaattgctttaagcaactccgcgccagtctgagccgagaacatccgtttaatgcccggtagcgggttgagtttggaaaacttcggctgcaaggatttgccgctaaataccagccctcccagcatgaccggagaaatgagcgccaccagcaccacgccgctaatcagcggcagcagcgccagcatggcttctctgatcagcagaataatctgcccgaggatcagattcgggtcattgataatactgtgatcaaaatgcagcccagcggagagcatgcccgacaatcgacgggccagcgacacaccgccaaaccagataacactaacgcccaccagcaaaatcagcagtgaggtcagttcacgggaacgcgggatttgcccctcttcccgcgctttttctagtcggtgaggtgtgggggcttctgttttgtcgtcgctctcgtcagacacgtcgccaatcctggaaagagtattaagcgtgaatgatgccagagcgcaaagcgttcaatggtttgagtaaggggcaaaacaggcgggatttagggcttttgctgccacacatcaagcatagtgtgcgtttgtcggatgcggcgtcatcgccttatcagaccgcctgatatgacgtggtcacgccacatcaggcaatacaaatcaaaatccaagactatccaacaaatcgtccacctgatcctgactggctaccacaccggctttgctggtatcgacctgaggtccattaagcaaactctggttttcacgttttggacgcgactcctgttccgggatgttttccaacagcaccatcagcaactggcgttcgatctcctgaatgacatccatcatccgcttaatgacctgcccggtgagatcctgaaaatcctgcgccatcatgatttccagcagttgcgcgttagtaaagctggtatgcgcgggtacatctgccagaaattgtcgtgtatctgttaccagttcacgggcgtcggcaaggtcaatcggatcggcaaaccagtcatcccaacgttgggttaacgcttttgctgatttctccatttgatcctgatgcggttgtgacgcctcaacactgttcagcgcccgctccgcagcctgggcggtcatctgcacaacatagtacaaacgatcgcgcgcatcggggatggcttccgccgcttcggcaatggcctgatccagccccagttcccgcaaactgtcgcgcagcatacgcgtcaggctgccgatgcgcgcaatgatatcgccagctgaatgctcgtcagcaggtttgattgatggttgcatcatagtcgcatcctcacatgcccagtttctcaaagattttgttgagtttttcctccagcgtcgcggcggtaaatggcttcaccacatagccactggcccccgcttgcgccgcagcaatgatgttctctttcttcgcttctgcagtcaccattaacactggcaatgccgacatcgcgccatccgcacgaattgttttcagcaattccaggccatccatattgggcatgttccagtcggagataacaaatccataaccgcctgcctgcaacttattgagagcgtcgacgccatcttccgcttcctcaacattattgaatcccagctctttcagcaggttacgcactatgcgtcgcatggtggaaaagtcatccacaaccaaaaatttaagttctttatccgccatttcacactcctgatttaaatacgtatcgcctgtccggcactaatttttgccaacatttgctggcttacctggctaagatcgaccacttcgcagacaccacccatattgatggcctcgcgcggcatgccgaacaccacgcaacttgcttcgttttgcgcaagggtccatgcccccgcctgacgcatcgccaacattcccgccgcgccgtcgttgcccataccggtcaggatcaccccaaccgcattacgccccgcctgtttggcgacagaatggaacaacacatctaccgaaggccgatgacggttaaccgccgggccatcgtgaattttgatttggtaatttgcgccactacgcgacagctccatatgccgatcgcccggcgcaatataggcatgccccggcaagacacgttctccgtcttcggcttctttaaccccgatctggcaaagcttattaagtctgtcggcaaaagagcgggtgaaaccgggcggcatatgctgggtaattaacagtgccgggctggaaagcggcaacggttgcagtacgtgacgaattgcctcagttccacccgttgaagcaccaatcgcaatcagtttttcagaactcaacaacggccccgccttcagcgttgtcggtgccgacaatggcttatgtgctgcaaggctcgcctttgctgccgtacgcaccttttcagcaatcatttcgttatacgccagcataccttcgcgaatacccagttgcggtttggtgacaaaatctatcgcccccagctccagcgcgcgcagcgtgacttctgaccctttgccggtcagggaagaaaccatcacaacgggcattggacgcaaacgcattaatttttcgaggaaatccagtccgtccatccgcggcatttcaacatccagcgtcagcacatcgggattgaatttcttaatcaagtcacgcgcgaccagcggatcaggcgcggtcgccaccatttccatgtcgctatggctgttgatgatttctgtcatgatctggcgcatcagtgccgaatcatcgacagataacaccctgattttgctcatcgttaatccttacttagcgcatacaccgtctgaccacgcagcgtgaagcggcgctcaaggtggctaaagttttcagagtgacccgcaaacagcaatccgtcgggtttaaggagcggaacaaagcggcgcaaaatctcctgctgggtagtttgatcgaagtagatcatgacgttacgacagaagatcgcatcaaacggccccggcacggtgtactgtttcgccagtagattcagcggggcaaaatcaacatagttcgccagctcctgacgcacgcgtaccagcccttcatgcggccccgtccctcgcatgaaataccgttgcagttgctgcggcgtcaggtttttcaactcttcatggcgatagataccgcttctggctttttccagcacttcggtgtcgatatcactggcaaacactttccagcgtccgggcgcggtgcccaatgtgtcagccagcgtcatcgcaatgctgtacggctcttcgccggtcgaagccgccgcgctccatacgcgatactcgccagaacggcgacgtgcgtgatccgcgagcagagggaaatgatgtgcctcacggaaaaatgccgtcagattcgtggtcagcgaattgataaacgcctgccactcaccgctgtgctgattagattccagcaagttcagataatgaccgaaatccgtcagtcccagcgaacgcaaacgacgaaccagtcggttgtaaaccatgtcgcgtttatggtcagccagaacgatcccggctcgttgatagatcaattgacttatccgccgaaaatgcgcgtcggaaagcgccaggcgctcggtcatctgtaacaataaagacgtttgcccacagggcagagatgaagtcatagcgccttctcaatcacttcaggataccactggcgcaatttgtaactgcaccgactcatgtcgtgctacttcatgttcttcaagggtaaataccgccacacgcgacgaaagatggtcggcctgattcgccagttgttccgttgccaccgccgcttcttctaccagcgaggcgttctgctgagtcacctgatccatctggctgacagcctgtgcaacctgctcaatcccccgctgttgttcttccgacgcagaggcaatttctcccataatgtcgttcacgcgggtcaccgaactgacaatatcgatcatggtcgcggcggcgttattcaccagtttcgaaccctgctggacacgattgactgactcttcgatcagccctttgatctcttttgctgcctgcgcgctacggctggcaagattgcgcacttcacctgccactaccgcaaaaccacgcccctgctctccggcgcgagccgcttccactgccgcattcagggccagaatattggtctggaaagcaattccgtcgataacgctgataatgtcgccaattttttgcgagctggtggcgatctcctgcatggtgtgagtcatggtactgacctgaacaccgcccgcctgcgccgttgtcgcggcattttttgccagttccgacgcctgtcgtgcgttatcggcgttttgccctaccgtggcggttaattgctccatactggcggccgtttgtgccagcgatgccgcctgctgttcggtacgacttgagagatcgttattgcctgcgacaatctccgcgataccaatgtgcatctcctggcttcccttacgcacatcacttaccgtcccacgcaaagcctgctgcatggtcttcagactggcaaaaatggcggtgatctcattacgaccatataccgcaatcggacgcgccagattacccgcagcaatgctgtcaaaatggctaccgataatggccagtggttgaacaatcatcttgcgcgtccaccacagcgcactgctgatgtagatcgccgcaacaataatcatgctgataaacaccagtgccgaaatctgatagttacgctggctttgcgcactggcggcttccagcacatggttgatctccagctgccaggcctcaaagttaacgtcaaacgcattctgtgatccctgcaccggcgcagtgaggaaatccgaaagttgattactttcaagccaggtcgcctgatgttcgagatcgttgtgccagcgggcaaaacttttctccgtctctttttgcaatcccctgacgtgctcgttgcccgcagtcatcgccataaaacttttaaacagcgtggtggattgcgtcagactggcgcgcgccgtcgtcatcaacgttttaatgtcatccgccggatagctaagtgccgtcagagtgcccgctttgttcagcgcggtactggcctgtaacattaccgcccgagtttgcgctaatgccgcacgttgctgattgctctgctcgacctgattcagtcgttgcaaatcgtcgcgaaatgcccaaaaagacatgccgttactgccaatctgcaagatcccgcagagaatcaaaattaaaaacagcgtggtcgaaattcgaatacgattaaacatcaacgctccccatcaggcggcaatgaccgcgttagtaaatactcgtcaaaatgtttcccagtttggatcttgttcagcaattcgcagtcgtggctgagccggtggttgctcactggcaggacgggatggtgtttgcggtttattggtgagtgggctggctgccagacggaacgcggaaactgcttgcgttaaacgactcgcctgttcttccagcgcagcggcggcggcagctgattcctgcaccagcgatgcgttctgttgcgtgacgcgatccatttccgaaaccgccaatgcgacttgatcgatgccacggctctgttcatccgatgccgatgcaatctcgcccataatgtcagtcacgcgagtgacagcattgacgatattgttcattgtttccccggcgctttcgaccagcaccgaaccggtatcaacgcgtgagacggagtcttcaatgagggctttgatctcttttgccgcctgggcgctgcgactggcaagattacgcacttcacccgccaccacggcaaaaccacggccctgttcacccgcacgcgcggcttcaaccgcggcattcagcgcgaggatattagtctggaaggcaataccgtcgataacgctgataatgtcggcaattttcttcgaactatcggcgatctcatgcatcgttttcactacgccatccaccactttgccgccgtgctgggcggtgtcggaggcactttgcgccagttgcgaggcctggcgggcgttatcggcgttttgcttcactgtcgcggtgagctgctccatgctggcggcagtttcttccagcgcggatgcctgctgttcagtacgggaggaaagatcggtgttgcccgccgcaatttcacgggtaccggcatagatggcatctgaaccttcgcggacatgagtgacggtgtcagtcaaagagcgttgcatatgtgaaacgctctgcgccaggtcgcccatttcactgcgcccgtcaatggtcagggtattcgccaggttaccaccggcgatttcgcgaatgtgagcaataatttttgccagcggagtaagcaacatacggcgaatgccgtaccacgccaccagcagaatcaataccaccaccagcgcgataaccgccagttgccactgggcaaatcggtaatcatctgcgttgtcagtgacgatatcgcgatacagtttttcactgctgagggcgtactgagcaaacgcttcgcccattgcattttgcattccctgggttggctgagcgaaataagctccagtattgccataatctagataatcaatcagttcagttaacgctgtgtaatagtttttatatttttcatcaatattacgactggtagcgaccatttcaggtaacggtgccatgcttttgaattttttataatgcgtcgctgcctgcgccaatgttttcctggcgctatcgagcaattcaactttggcgttactttgttgattggaggaatccatcatcatccgtaccgctgaacgactcaggttaatgcgcgtttgcagcattaaatcccaggttgacgtcagctcgccctgctgttcccgtaattgattggaaaccacaaagctcttctggctatggtgaagggaagaaaaaaacagactgccggaaataagctgtaacagtgcgaatacccccagcaccattaccaacagcgtgactacgcggatacggttaatcataaggcaccttcctgaaaacaagttgatctcgttatcggcaaggaggggggaaactttattgctgatgccacccgccgcgaaattgaaataaaaaacccgatgcgcagatcatcgggttcatttcaattgaggaaatcgggagaattacgccacttctgacgccgcgctatctaacagcgccatctcttcgctgttcagcagtttttcgatgttcaccagaatcaacatccggtcgcccagtgcgcccagtccagtgagatattctgttgaaagcgtcacggcaaattccggtgccggacgaatttgctccgccgtcaatgaaagcacgtctgagacgccgtcaaccacgatgccgaccacccgctgtccgagattcaggacgataactaccgtgttgtcgttatagtccacatccacctggctgaacttaattcgtaagtcaacaatcggcacaataacgccgcgcagattcgtgacgcctttgataaacgctggcgtgttcgcaatccgtgttacctgatcgtagccacggatctcctgcactttcaggatatcaataccgtactcttcatcaccaagggtaaataccagaaattcctggcctgacggctcgctggccagctttgttacattcgtcataccggtcatattgttacctttttactcattcaggcggcggtgttcgccatacgttgttcgcggtttatcgcctgcaaggcggagacatcaacaatcagtgccacgctgccgtcgccaagaatggtcgcagcagaaatgccggggactttgcgatagttactttcaaggtttttaaccacaacctggtgttgaccaattaattgatccaccagcaaggcgtagcggcgaccgccactttgtaagatcaccacaattccctgggtggcttcggttttcgcgcccgcgacgttgaacactttccacagttcgacgatgggcagatattcaccccgcacttccagcacccgctcgccgccggccagtggatggagatcggcttcacggggttgcagtgattccataacagcattcagcggcagaatgaaaacttcatccgcaacgcgtacggacatgccgtcgaggatggccagcgtcagcggcagtaaaatgcggatcgtagtgccagtaccctgcttcgactggatttcgacatgaccgcccatcttctggatattacgtttaacgacgtccatgccgacgccgcgcccggagacgtcggtgacctgctctgccgtggagaagccaggtgcaaatatcagcatcgcgacttcgtcgtcgctcatgttttcgctgacagtcaaaccttgcgaggccgcttttgccagaattcgctcacggtttagccccgccccatcgtcggtcacttcaatgcaaatgttgccgccctgatgttcggcagacagaattaaatttccgacgctgtttttacctgcggcgagccgtttttctggcagttcaataccgtgatcgaggctattgcgtaccaggtgggtcagcgggtcgataatgcgttctatcaggcttttgtcgagttcagtagaactgcccaccagcgtcagttctacctgcttgccgagttttcccgccagatcacgcaccagccggggatagcgactaaaaacatattccatcggcatcatgcgaatcgacatcactgattcctgcaaatcacgggcgttacgttgtaactgccccatgctggttatcaaatcaccatgattaaccgggtccagttcgctggaacgctgggcaagcatggactgggtgataaccagctcgccgacgaggttaattaattgatcaaccttttctaccgctacacggatgctggtggattcattgctgcgcgtcgttttttcccgctccacgcggccggttggcgcttgttcggctgccagtttaagcactggtggggtggatatttttggcgagacttctactgtttcaaaggtaatctgatcggcttcaatcacaaaacagagtaccgctgtgatgtcatcttcggcgatgtcgcccggtaatattgccgagagcgaatccgcccctttcaccacgtcagttaacgttgtcagatgtcccagttcttcttccagcaggtcgacttccccggccttcaggcgcgaaaggataattcgtcgcggcgactgactgcgactctgctcatcttgcggttcacttttggcaaccacacttaatcgggtcactgcggatggcgtttcgcctttcgcttctaatgccagttgacgcaaggcctggcagatataatcgaagctggcggcatccggctcttgcgactgtttataagcgtcgagctgttcttgcatgatgtccttcgtttccaaaaacagattgataatgtcggtgttgagttgcatctcacctcgtctggcttcatcgagcaggttttccatcagatgcgtggtttcctgcaaaacgctgaagccaaaagttcctgcccctcctttgatcgagtgggcagcccgaaagatggcattcaattgttcggcatctggcgcttccggctgcaaaaccagcaaatgctgctccatgtcagccaacagttcgtccgcttcatcaaaaaatgtctgataaaaatcgcttatatccatgctcacgctgtcacctcggttcggctgatggcattgtgggaacactgacctgtggtgcaacctcaggtttttccagggcgcttactggctcattctggctttcggcgttttcatgcaaaatggcctgttcggcttgtttgttcagtaccagcaggctgatgcgacggttgacggcatcatcaggtccgcgatcgcttaagcgcatcgttgccgccatgccgacgacacgtaacactttgccgctatccaaccctccgaccatcagttcgcggcgggatgcattggcccgatcggcagaaagctcccagttgctatatcctttctcaccgctggcgtaggggaaatcatcggtatgacctgaaaggctaatacggttgggaataccgttcagtacaggcgcaatggcgcgcagaatgtcgcgcatatagggttcgacatcggcactgccggttctaaacatcgggcgattctggctatcgatgatctgaatacgtagaccttcctggaccagatcgattttgagatggggacgtaacgcccgcagtttcggatcggactctatcaactggtcgagatcaccccgcaatttccgcaatcgactttgctccatgcgttttttcagctcttcgatgttcggctgcttattcacttccccctggctttgggtgtaatcatcaccaccgccgggaattgggctttcactattagaaatgcgatcgccgcccgtaaccgcagtcgccagtggagtccggaagtactccgcaatctgaatcagctcttttgggctggagatggagatcagccacatcaccagaaaaaaggccatcatcgcagtcataaagtcggcataagcaatcttccacgatccatgtgctgccccgtggcttttggctttgcgtcgtttgacgacaataatcggatgcgcttgattcttcatgcttcctcggttgtcgtctgttgttgcggatttttcaccgcacgcacatgctcttccagttcaataaacgacggacgttcgctggaatagagcgttttgcgaccaaactcaacggcgataggcggtgcgtaaccgttcagattagaaagcagagtgactttgacgcactgcatcattttgctggtttcggcgcttttctgacgtaaaacagtcgctaatggggaaataaatccgtaagccaataaaatgccgaggaaagtccccaccatcgcatgtgcgataagcgcacccagctcggcggcaggacgatcggctgaacctaacgcgtgaacgacccccattacagccgcaacaataccaaacgccggaagtgagtccccgaccagcgccagactgttcgccgggacttctgcctcgctttcgtgcgtctcaatctcttcatccatcagagcttcgatttcgaaggtgttcatgtgaccgctgataatcaggcgcagataatcgacgataaaatcaagcatgacgctatccgcgaggatgcgtgggtagctggcgaagatctcgctctcacggggattttcaatatcacgttccagcgaaaacatccccatctgccgcgatttcgccatcaaccgataaagcagagccagcagatccatatacattgctttggtgtatttggagcgacgaaacagcaacggcagcgccttcagcgtgcctttaatcgctttgccattattgccgacgataaacgacccaatccctgcaccggcaataatcaccagttcagcgggttgatagagtgctccaaggcttccaccggtcatcaaataaccgccgaaaactgtaccgagaacaaccaggtaacctaataagataagcacgacatcatccttccactgttgaccatgacaggatgttcagtcgtcaggcgttaacgcgcgattggggcaaaaaaaagcagcggtacgtcgttaccgctgctggaatgttgcgcctcaccgtatcagttaaacagcctgtactctctgttcatccagcagttgtgggataatatcggcaggattctgggaaagtttacgtctttttactgcccgggatggcggttgacataagctgcaggcaaagctgccaacaggctggtgagcgtgggtaataaaattgccgccgcagcagttgcagctggaaagttgcagtaatccactttcaacaaaccgcaccaatgtccaggcacgggttaatgccagcagtggtccttcttctgcttgtgggcactgttcaaggtataaacggtaggctttgatcaccgcatcgacgccattacacaaaccggttttcagtaaaaactgccatgcattacagaacatcgaagcatgaacgttttgttcccaggtcataaaccagtcggttgagaatggcagcatgcctttcggcggtgggcttccgcgcagttctttataaagttttatcaggcgtccgcgacttaactgtgtttcgctttccagcatctgcaaacgagcgcccagggtgatcaattccattgccagctgaatatcccgcgcttcctgaacaatgcttttttcactcatgatcaggcccttttcttgcgcagcgcttcttcaggctgattaacatcattcagcaagcgtgttgagagcatgatgccggtatgaatttgctggagatcgtcaacgcgggaatcttgcgtcaactgagtaatcgtctggtggctgtcaaaacggaagtgacaaaccagttgattggtttctgccagcttaaccatttgcggaagagtcagtgccgctaacgttgtcgccatttcttcatttatgccgagacgaaacatagcggacgctttgtcctgaacaatcaaacgctgtgcaagtagtaaatatgacaagttgatgtcataaatgtgtttcagcaactcggaggtatgcattattcccacccagaataaccaactttatttttatgcggtttcaccgcaccccgtgatgtcgccgggaagccccggtaaaaaataattagcattagaatagttgcgataagctgcaataagcagaaccacctttttggtttaatatgtccttacaaatagaaatgggtctttacacttatctaagatttttcctaaatcgacgcaactgtactcgtcactacacgcacatacaacggaggggggctgcgattttcaataatgcgtgatgcagatcacacaaaacactcaattacttaaggaaggtgcgaataagcggggaaattcttctcggctgactcagtcatttcatttcttcatgtttgagccgattttttctcccgtaaatgccttgaatcagcctatttagaccgtttcttcgccatttaaggcgttatccccagtttttagtgagatctctcccactgacgtatcatttggtccgcccgaaacaggttggccagcgtgaataacatcgccagttggttatcgtttttcagcaaccccttgtatctggctttcacgaagccgaactgtcgcttgatgatgcgaaatgggtgctccaccctggcccggatgctggctttcatgtattcgatgttgatggccgttttgttcttgcgtggatgctgtttcaaggttcttaccttgccggggcgctcggcgatcagccagtccacatccacctcggccagctcctcgcgctgtggcgccccttggtagccggcatcggctgagacaaattgctcctctccatgcagcagattacccagctgattgaggtcatgctcgttggccgcggtggtgaccaggctgtgggtcaggccactcttggcatcgacaccaatgtgggccttcatgccaaagtgccactgattgcctttcttggtctgatgcatctccggatcgcgttgctgctctttgttcttggtcgagctgggtgcctcaatgatggtggcatcgaccaaggtgccttgagtcatcatgacgcctgcttcggccagccagcgattgatggtcttgaacaattggcgggccagttgatgctgctccagcaggtggcggaaattcatgatggtggtgcggtccggcaaggcgctatccagggataaccgggcaaacagacgcatggaggcgatttcgtacagagcatcttccatcgcgccatcgctcaggttgtaccaatgctgcatgcagtgaatgcgtagcatggtttccagcggataaggtcgccggccattaccagccttggggtaaaacggctcgatgacttccaccatgttttgccatggcagaatctgctccatgcgggacaagaaaatctcttttctggtctgacggcgcttactgctgaattcactgtcggcgaaggtaagttgatgactcatgatgaaccctgttctatggctccagatgacaaacatgatctcatatcagggacttgttcgcaccttccttaacataaatgtataagtcatacttttgttttgggtgtatttcaatctgttaaaaagtttttcgctacgctagcaagcaaaaatgaaacaggaataatcgaaatgggatgttgcgcacagtcaaaataactcaccgtaaataatcatctgctataaataatcactttcatgcaataccagataagctatttttaaacagacacttaccgcacaacaaactaattaaatacaaagaaaggcaacaatcaacttaatgttaatgaaatgttttacatatattaaccacttgtttaatgcggagaatcagtacactattttcttataattacatttgaaattatatgatcaccgggagtgattgattaattatctttactaataatcagactaatatttacctgtttgaccgagttgggattgcgtcgtttctccattaggagtaaagctttaatgtcacctgaagttcacagaataaggaacaggttatgagctatagcaatattcttgtcgctgttgcggttacaccggaaagtcagcaactgctggcaaaagcggtatctatcgccaggccagtaaagggacacatcagtttaattactctcgcttccgacccggaaatgtacaatcaattagctgcgccgatgcttgaagatttacgcagcgtgatgcatgaagaaacgcaaagctttcttgataagttaattcaggatgcggggtatcccgttgacaagacgtttattgcctacggtgagttaagcgaacatattctggaagtatgtcacaagcatcatttcgatttggtgatttgcggtaatcacaatcacagtttcttttcgcgagcatcctgctcggcgaaaagagttattgcctcaagtgaggtcgatgtgctgttagttccacttacgggagattaaccgctcctacgcaagctttggaaaggtagcaactttatcgcgctgctggctttccgcgcttcgcggaactatctgctttaggtcgctaatgaagcactcctgccagtggttaatatcgtttttcacgataacgtccagcatttctgcatgacgggaaatacgttccgccagcgacatagtcaatgcacgatccagcgcagctgcaacttcgtcacgatcgtaggggttaacaattaacgccgacgttaactcgtttgccgctcccgcaaattgcgaaagaacaagaacgcccggattggctgggtcctgagcagcaacatactcttttgctaccaggttcatcccgtcacgcagtggcgtcactaagcccacgtcagagtagcggaatattttcatcagtaatttacggtcaaaatgctgattcaaataataaagcggcgtccagcctaattgcccgtatttaccattaattcgtccagcttcattttcgagctgatgacgaatatcctgataggcttgcacatcaccacgcgacgttggtgcaatctgggtataacgaattttaccatgatgctgcggatatttttccagcaacgcttcataggcgagaaaacgctctggcaaacctttggaataatccagccgttcgacagaaaagatattttgtacgtttttcagttccgctttaagttgcgccagttttggcggcagtggcccggcagcctgtttggctatttctttcggttcaatgccgatcgggtagacttctgttcgaaatgctttgccccaggctgtatggctttttgcgctacgtgtcgtgacgcgggtcaggttagaaagacaatccaggaacgccagacgatcgttttctgtctggaaacccagcaaatcataatcacaaagctgttcaagcaaggtgtcatatgtcggcagcgcgttgaagatttccggtgtcgggaaaggaatatgcagaaagaaaccaatgcgattattcactccccgtttgcgtaattcatgcgcaaatggcaacaggtgataatcgtggatccagataatgtcatcgtcttgcaacagcggcagtaatttatctgccagcaacgcatttacgcgtagatagccgtcccaggcaggacgctgaaattgcaccagatcgagccgataatgaaaagcgggccagagaacggcattggagaattggttgtagtattcgtcaaggtcctgttcgctgaggttaaaagaggcccacgtaatgttaccttttttcaccttttttagcggctgatcctcattccctgtttcaccactccagccaaaccacagtccgcctgcggctttcagtgcccccagtatgccaacggcaaggccaccggcactggcggcgtgctcgtctggtggtgcaatccggttagatactacgactaaacgactcatagtcatcactcctgttattttctcttttttgttgtaatgcggtggttatcatttcaagccagctccagacatccggcacacccgccagtcgccatgatgcctgagttgcacctgtgccaatttttactgacattccgcccagtcggttaacgactgcgaagccagattcatcggttaaatcatcgcccagaaatacgggcgttcgcccgataaagggagcttcctgcataaaagctgcaattgcctcacctttactggtacctctcggtttgatctcgacaacacactttccctgctgtaacgccatttgtggccagatctgagtaatacgttgcgctaatgtcattaatgcgtcttcatgctgcggagcctgacgataatgcagcgcaaaagccatccctttcgcctccagctccgcgccgggatactgagcgatgactgtatgcagttgcacgctaatatcacgcgcaatcgcatccggcagatgaacgatatgtgttttaccattgatgtcacggcgctccgccccatgcacgcccgctaacgggaagcgataaggttttgccagtgcgtcaagctccaccattgagcgccctgatatcaatgccaatgcaccatcacttgcggttgccagtagctgtagtccttgcagaatattgtcaggcacgacgacctgatcgggatgcggtttgatttccgccagcgttccatcaagatcaaaaaaccaggcatatttcgcggatagttcaggggtttcggttaacggttctgtcacccggttctcctccttctcttttcttattgtgttgcgcagaacgcgctttacagacatgtaagtatagacagtgtgacgggggtcgccatttgcaacgaagaacagccaaccgttatggcggttggctatggtgggaaaaaacgctaaattgttgcagaaaaaagcatcagacagtgcgtttcgctttttgcttgtaacggtcgaagatcaccgctgccagcaggattaagccgcgaaccacgtactgcgcgaaaggagaaatattaagcaggttcatggcgttttccacggtgcctaaaattaagatacccgccaccacatatgagatttttccgatgccacctttcagagaaacgccacctaaaacgcaggcggagataacaatcagctcataaccaatcgacgtcattggctgcccactggtcatacgtgaagccagaataattccggctatcgctgataccaggcctgagagaacaaagataataattttggtgcgaacaaccggtacacccgccagacgcgcggcctcttcgttcccgccaatcgccagggtgttacgaccaaaggtggttttattcagcagcaaaccaaagataatcagacacgcgacggtgagccagattggcgcaggcagaccgaaccagttggcgtaaccaagggcaaagaagctttcatcttcgataccgaccgctttaccgtctgaaatgatgtacgccagacctcgaacaatctgcatcgttgccaatgtcgtgatcagagcatttattttcagtttggcgataacaaagccattgaccaggccacagagaacgcccagcaacaaccccgctgccacgccaatccacaggctttcagtcaggttaataaccaccgccgtggtgacacccgcacaggcaattacggaggcgacagaaaggtcaaagtcaccggaagcgaggcagaacaacatgccacaagccaccatccccgacatggaaattgccaggcccaaccctttcatattaatgaaggtggcaaaatttgggacaaaaatggcacaggcgataaagagcaccgcaaacaccaccagcatgccgtactgatcccagatacgcccgaagctgaatgacgacttaggtgcgccagaccccgatgtagaaacagaagacatcatactctccttactcaggcaacagcctggctgactttaggcatcgcaaggctcagtgcctgacgctcatctgcctgctcgtgtaacaattcaccggcgatttcaccttcccgcatcaccacaatccggtcggcaacgccgaggacttcaggtaagtcgctggaggcaaacagcaccgccacgccctgcgccgccagcgcataaattacgttatatatttcgtgcttagcgccaacatcaatgccgcgcgtaggttcatccagcaaaatgaccttcatctcttccgataaccagcggcccagaatggctttttgctgatttccgcctgagagattcatgatcagttgctccgcgcccggcgttttgatgttgagcgaacgaatgtggtgatcggcattgttttcttcccaaccgttgttgattacacaaccgccgagcacatgtttacgtctggcactgatgttgatattgtcgcgaacggagtgcacgggaataatgccttccgctttgcgatcttccgggcagagcatcatgcctgcggcaatggcgtggctcggtttacgaatatcgatcggctgttggtcgatataaacctgaccggcggtgatttgcgtcccgccaaacatgcctttcattaattcgctacgccccgcccctaccagaccaaacagcccaacaatttcaccactgcgaaccgccagacttattggcgtacgcacgcctggtgctttcacagcatcaagacgtaggcgctcctcgccataactacgcggttgccagccgtagatatcgccaatgtcgcgcccgaccatcgcctgcaccagcgcgtcgtggtcaacctgctgcatatcggtaaaggttttgacataacgtccatctttaaagacagtaatggcatcgctgagggcaaatatttcttccatacggtgagaaacgtataagattacccgcccctcttttcgcagttcacgaataacgcggaaaagattgtcgatttcacgggcagagagggagctggttggctcatcaaaggcgataattttggcgttacgcgccagcgctttggcgatttcaaccatctgccactgaccaatggagagatatttcagcggcgtgtccgggtcaatatccataccaagatgtttaagttgtaaacccgcctcataattcagcaatgagcgattcacaatgccgcctttatgcggcagctggccgagatagatgttttccgcgacggtcatttccggcacgagatgcagttcctggtaaataatcgccacgcccgcgttaagtgctgcggtcgtgtcggaaaaggacatttcctgcccattaatcactacagaacccgtggttggcgcatagttgccgctgaggatttttaagagagttgattttcctgcgccattttcacccatcaacgcatgaacctgaccggcatagcagtcaaaactaatatccgtcagcgccttaacgccgggaaacgttttaccgatgccgcgaaatgagagatacggggtagactgttgcataacgtctccgtgaatcactggtcgttcacaccccctctgcatcatgcagaggggaatttttccggcaaattacttaccgcctaaaccttttttctccagttcttctttaaagttgtcacgcgtgatcagtaccacgtcggtaacttcggtaaattttggcggttcaacgtcttttgctacccagttgtaaagcatttcgctggatttatagccatgtacgtccgggcttggcagcagggaaccgtagaagccggttgcctgtgctttagacagttcgctcaccgcatccacaccgttaatgccaatgccgatgatatcggccgctttaaagccctgaccttccgtcgcgcgtacgccgcccagcacggtgctgtcgttcataccgacgatcagccaatgtttaacttccggatgttgaaccagcattgagttggcagcgtcaaatgcccccgggatgtcgttagatttggtaggtacctgataaatttgtttttccgggaatccggccgctttcagcgcatccatagatcccgtagtacggcggcgggcggtatccagttcgttggcggtaatcgccatcaccgcgctttctttgacatcccagccacgtttctgcatctctttatacagttcctggccctgacgttcgccaattttagtcgccgccatcatcaccagcggaacggtatccattggcttacctttggcgttaacaaactggtcatccacggcaatgactttcatatcgtagccacgcgctttcgcgacgatggcagagccgagtttggggtccggagtacaaataacgaaaccttttgcgccactggcagccaggctgtcgatcgcgttcaatgttttttcgccatccggcacggcaatcttaataacctcaaaccctaaatccttcccggctttatcggcaaacttccattcggtctggaaccacggctcttccggttgcttcaccagaaaaccgagcttcaggttctccgccatagcggattgtgacataacggctgccagaccaatggctgccagggctttagtaaatttgtgcatggttctctccagctttagtgtcgttttgtgtagggcaaaaacgaatgacattcgttaaattaatcggaaaacaaagcattaccttttaactaaaagataagtgactgtgttgacatagttttagcgagaaattaattctccataggagagcaatatcacatcgcagaattacagtgagaacgtgcataaatttagcgggaaaagacataagggaaagccaatttgtcagacaaattgtcgaatgcacagcagattaatccataagattagcctggaaatccttgttgtctttggtacccatgcgggatgtcttctttttaaccagtcaataggccgcattacctggcgttgagtttttgaaatggtgtaataaccgcaactcaaagatgtggaaaatgcacgtcattcatttcgtcattaattatcactgtgctcattaattaacagaacacgtataatgagagccatctcgcaaaaatgaaaaaacgttttataaaatcatcacttcatcatgaattcaaattcattgattaatatcaacaagatacaaaaagcactatcattaaaattcattgcagttacattgatttcatcaatgaaatgtaaaaatatataaacttgatgatttaagcattttcttatacccgttcagacgttattcttatttcagatcatcgtcagaattgactccacgatcacatttcggaccggcagaaaggaattattctgcaaacagtaattatggtgttttgatttatcttgcacctctccacttctggatataaggatattaggtatggcaaccgctggaatgcttctcaaactcaactctcaaatgaaccgcgagttttacgcatccaatctctaccttcacctgagtaactggtgttctgaacagagtctgaacggcaccgccactttccttcgcgcccaggcacagagtaatgtgacccaaatgatgcgcatgtttaactttatgaagagtgtcggcgctacccccatcgttaaagccattgatgttcccggtgaaaaactgaactctctggaagaactgttccaaaaaacgatggaagaatacgagcaacgttctagtacgttggcacagttagccgatgaagcgaaagaactgaatgatgattcaaccgtcaatttcctgcgcgatctggaaaaagaacagcagcatgatggtctgttgctgcaaaccattcttgatgaagtgcgcagtgcgaaacttgcgggtatgtgccctgtgcagaccgaccaacatgttctgaatgtcgtgtcacaccagctgcattgatcatcatcggcgctaatgcattgcgccgatgaaggttttgagaaaccgctgcctcatctgtttgaagcagcggtttttttaatgggattcaccctgtggggtaaacttgagttcaataagcgcgatggctttttggattgcccgcatggtgaccgggtctgcggcggcgggatggttagtaaagtcgatattcttcagctgactggacattttttcacgaacttcaacgggcgcgattacatcgagaacatccagaatttgtttgataaccaactggcaagcaaccacatcagaaaccaattcctgatcggcattcagcggctgggacatcgtaaactcctgatagcattttgaaagccgttatagtagcgacttcacatcttcagcgatagtcacatccaccgtcatcaggacacaaaaaaacctgccggagcaggttttttgttatcggaacatattgcctggcggtacgtctttgaacgtcttgcaatagttattgaacatacttttcaggattttgcgcagtttcatcgcggcactccgaccatttgttatacaggtgttattgtctttgcgcttataatatgacaaccatcacaaaaatcaatctttatgtgatacaaatcacataaatacccctttaatgttataaaaatgataatcaaaaaacagcccccctatttctgacacctacagatggcaagaaatagcgcctgccaggcgtcttttccggccattgtcgcagcactgtaacgcgtaaaatagtgctttctcttactcttctggctggaccatgagacttctgattctgactctttcattaataacgctggcggggtgtacggttactcgccaagcccatgtgagcgaagttgacgcggcaacaggtattgtacggttagtttatgaccaggcttttttgcagcatgcccataccgatcgttatgtcagtcgcgggatcgccgatcgcgcatgccagcaggaaggctatacccacgcggtcccctttggtcagccagtaggcaactgtagcctttttgcgggttccttatgtttgaatacggaattcactttgtcatatcagtgccatcattccgccttccctgtctttctctaaatattttaatcagcgaggggatcttcgctgattaaagaaatagcggtaatgcgttttattcccattcgtatttttaataattgaagtttatattttaccttttgcaaataataaaataacaaattatagtgacgccacagcaacaaatataacctttgtggagcactatcatgctgaaaccagaaatgattgaaaaacttaatgagcagatgaacctggaactgtactcttcactgctttatcagcaaatgagcgcctggtgcagctatcataccttcgaaggtgctgccgcgttcctgcgccgtcacgcccaggaagagatgacgcatatgcagcgtctgtttgattacctgactgataccggcaatttaccgcgtattaataccgttgaatctccgtttgctgaatattcctcacttgatgaattattccaggaaacctataaacacgaacaattaatcacccagaaaattaacgaactggctcatgctgcaatgaccaatcaggactacccaacatttaatttcctgcaatggtatgtttctgagcagcatgaagaagagaaactgttcaaatcgattattgataaattaagcctggcaggcaaaagcggcgaaggtctgtattttatcgacaaagaactctctaccctcgacacacaaaactaatgctctccggcggcaggtttactgccgccgtttcaaatcagtgacggcaaatcttactctgatcggtcgaaaaaccgtctttcgaaggtataaatttgccttttgctgccagaaacgctaccagctctcccgctgtcatcccttctgccgagcaggtgtgaaaacgtgcctgttcaccaaaacgcgctttaatcgcagcttccagactggcatgcgtatattgctcgcctgattcaatcatcatatttaacacttcatgaccgtgaatagagtccatcgtccctcctcaaaaaaagcctagcgtagcgattgccgcttatgaagactttgcgccagcgcaggactgaatgctttttattgtacatttatatttacaccatatgtaacgtcggtttgacgaagcagccgttatgccttaacctgcgccgcagatatcactcataaagatcgtcaggacagaagaaagcgtgaaaaacagaaccctgggaagtgtttttatcgtggcgggaaccacaattggcgcaggcatgctggcaatgccgctggctgcggccggtgttggttttagcgttacgttaatcttgttgattgggctttgggcgttgatgtgctacacggcgctattactgctggaggtgtaccagcatgttccggcagataccggtctgggcacgctggcaaaacgctatctgggacgctacggtcaatggctgacgggcttcagtatgatgttcttaatgtatgctctgactgcggcatacatcagcggtgccggtgaattgttggcctccagcatcagcgactggacaggtatttctatgtcggcaaccgctggcgtgctgttgttcacttttgttgccggtggcgtggtttgtgtcggaacttcactggtcgatttatttaaccgttttctgttcagcgccaagattatttttctggtggtaatgctggtactactgctgccgcatattcacaaagtgaatcttttaaccctgccgttgcaacaggggctggctctgtctgcaatcccggtgatttttacgtcgtttggttttcacggtagcgtgccgagtattgtcagctatatggatggcaacattcgtaagctacgctgggtgtttataatcggtagtgcgatccccctggtggcatatattttctggcaggtggcgacgcttggcagcattgattcaacaacctttatgggattgctggctaatcatgctggattaaacgggctgttacaggcgttacgcgaaatggtggcctctccgcatgttgagctggcagtgcatttatttgctgatttagccctcgccacgtcatttctcggcgttgcgttaggcttatttgattatctggctgatttatttcagcgttcaaataccgttggtggacggttgcaaactggtgcaattacgtttctgccgccgttggcgtttgcactgttttatccacgaggatttgtgatggcgctgggttacgccggtgtggcgctggcggtactggcattgattatcccttcgctgttgacctggcaaagcagaaagcacaatcctcaggcgggttaccgggtcaaaggtggtcgtccggcgctggtggtggtgtttctctgtggtattgctgtgattggcgtgcaatttttgattgcggcagggttgttaccagaagtggggtgatcagatagcctcaaattccttattgggtgccagaattaacgctgacacccaatttggcctcttaatgcaggcagcactgcttaaatttcttaccactaccgcacgggcaaggatcgttacgccccggtttctcttctgctttgatcggttgctgaacagctttttcctgcggatgcgccatccagtacgcatgtagatcaagcgccgccagtcgaatggcatctacgctctcttcaaacgcttctggcgacatcttttctacccgctcgaagttttcctcagtaccgtgcagcgcaatcgcctccagcgctggttttaacgaatcgggcaacgttgaccagtcagaaagtgccacgccccgcatatagccaaagcaccactcctcaacaatcgtcagctcgctgccatcaacttctcgcaagccgaataacggctcaaactgctccgggaattcgttcagacgctctgcggtatcggccatatgttgaaaagccagattcataaagcgcgtcatctctttctctgacgcccagcgcggcacatagtcagccccaccccacacggcaaccagccactgttccggttcaatctcttgcggagaactcaacaccgccgtcaataaaccgtccagctccgccacatcaaggatggcgtggtcagtgttgtatttggtcagaatatcgtccagccattccaactcactttcgtttaacggtcccgttttcatacgcttttccttgtggatctcaactcgccagcacctatcttacatgccggtccgtatcagagatactttttgagtggctttgctggtgattaaaaattaaggagggtgtaacgacaagttgcaggcacaaaaaaaccacccgaaggtggtttcacgacactgcttattgctttgattttattcttatctttcccatggtacccggagcgggacttgaacccgcacagcgcgaacgccgagggattttaaatcccttgtgtctaccgattccaccatccgggctcgggaagaaagtggaggcgcgttccggagtcgaaccggactagacggatttgcaatccgctacataaccgctttgttaacgcgccaaattcttcaggcctttcagccagacatccgcttgacgccgatgtcttttaaactggagcgggaaacgagactcgaactcgcgaccccgaccttggcaaggtcgtgctctaccaactgagctattcccgcattcatcaagcaatcagttaatcacttgattttattatcgtctggcaatcagtgccgccgttcgatgcgttgcattctacttacctggcgcgatgagtcaacgatatttttcaccacttttgatcgtttgctgaaaattacgccgaaacgatcactgatcaagcaaatctgcacgcgcagcgctcaaatattgcaacattgaccacagagtcagtaccgcagccacaaagaaaagtgcaataccggcgtactcaacccaaatgttcggacgccacagcagccatgccaacgccaccatctgggcagtggttttcactttcccaatccaggagacggccacgctactgcgtttacccaactccgccatccattcgcgtagcgcagaaataataatttcacgggcgatcatcgttgccgccggtaatgtcacccaccagctgtgataatgctcggttaccagcaccatggcgatagccacgagaactttatctgccacagggtcaaggaaagcaccaaaccgggtactctggttccagcggcgtgccagaaaaccatcgaaccagtcagtcaccgccgcgacgcagaaaatgagcgcggcggcaaacggcgaccaggtgacaggcagataaaagaccaatacaaagaatgggataaggatgacacggaacagtgtaagcaacgtagggatattaaattgcataatgacgggtaactatctgttgtcagtaagattacccctatgttgctacagagacatcaatgtttcaacgaccagaagatcttttctgccagaccttgcgaaatacccggcacttttgcaatttcctcgacgctggcgttacgtaaaccttgcaaaccgcccatatatttcaacaacatttgccgacgttttggcccgacgccttcaatggtttccagggaactggtatttttgaccttcgcccgttttttacggtgcccgccaatcgcgtgatcatgtgattcatcgcgaatatgctggataacatgcagcgcgggtgaatctggcggcaaactaaatccctcaccttccggctcaaagaacagcgtttccagtccagccttacgatctgctcctttggcaacgccaagtagcagcggatgatttttatcccatgagacatccagttcggcgaagacatttttcgcctgcgcaagctggcctttgccgccgtcgataaggatcacatccgggatcttactgtcgtcaatggctttaccataacgccgacgcagcacctgattcatcgccgcataatcatcgcccggcgtgatgcctgtaatgttatagcgccgatactccgcacgcagcgggccgttagcatcaaacaccacacaggaagcgacggtttgttcgcccatggtatggctgatgtcaaagcactccatccgcttcacttccggcaatttcaacacgctggcaagcgcggtcagtcgctggtgaacggtagattgctgcgaaagtttgctggttaaggccgtcgccgcattggtgcgcgcgagtttcagataacgcgccctatcgccgcgaggtttggtttgaacattaatcttgcgtcccgccagttctgaaagggaatcggcgagcagcgttttatcgctaagattaaaatcgagcaggatctcacccggtaaggtgcgcatctggctgccttgtaaatagaactggcctacgaaggtttctaccacctcgctcagttccgtaccgccaggcactttcgggaaatagctgcggctgccgagcactttgccctgacgaatgaacaatacgtggacacaagccatgcccgcatcgaacgccacaccaataacgtcgaggtcgtcgccggtattggaaacgaattgtttttcggtgacgcgtcgcaccgcctgaatttggtcgcgaatacgtgcagcttcttcaaactccagattctggctggcagtttccatacgactaatgagttgcgtaagcacctgatcatctttgccagacaaaaacaggcgcacatactcgacctgctgagcgtattcttcttcactcaccagtccttcaacgcacggtcccagacagcgccctatctggtattgcagacacggacgcgagcgattgcgataaacactattttcgcactggcgaatggggaaaatcttttgcagtagcgccagtgtttcacgtacggcatagccattcgggaacgggccgaaatattcacctttggcatgcttcgcaccacgatgcatcgccagacgcgggtgggtatcaccactcaggaagataaaaggatatgatttatcatcgcgtagcaaaacgttgtaacgcggctgatagagtttgatgtagttgtgttccagcaacagcgcttcggtttctgtgtgagtaaccgttacatcaatttgctggatctgggcgaccagcgcttcggttttgcgcgaagcgaggttgctacggaaatagctggaaagccgttttttcaggtctttcgctttgccgacatagataaccgtaccaccagcatcgtacatgcgataaacgcctggctggctggttacggtttttaaaaacgcttttgcgtcaaactgatcactcactgacttgataatgtctccgcattacacagaccatggcgaattgccaggtgagtcagctcaacatcgccatgaatgtttagtttactgaacatacgatagcggtagctgttcaccgttttcggactgagattgagctgttctgagatctcattgaccttctggcccttggtgatcatcagcataatctgcaattcacgttcagacaaactggcaaatgggctttctgttttttctggttcgatctggcttaacgccatttgttgagcgatgtcagaagcaatgtaacgctgccctgaatagacagaacgaatcgcactcacgacttcctgcggagccgcgcctttgctgaggtagcccgcagcaccggcctgcatgactttcgctggtaaagggttttctgtatggacggtaagcatgatgattttgacatcagctgtggaacgcgcgattttacgcgtcgcctcaagaccgccaatgcccggcatactcatgtccattagcaccacgtcaacggcatttgtccggcaccacttaacggcgtcttcaccgcacgatgcctcaccgacgacttttataccctttatatcttccagaatgcgtcgtatccctgcgcgcaccagttcgtggtcatcaacaagtagaacgttgatcaaaggaatatctccagaaatagggataacgctactgatagttagtcattcgtatattagcggtttttattgcaactttgaaacgttaaaaatggtgggtattcgatttttctctcgtttttgtcaattcgattgtccacagttatggtcacgcccgtcaccaacggcttaccggatcgtttcacagtaagccctacgatgaaatgtgacaaaaattgactttattcagcaaaaatgaaaatcagcccgctgaatatgtaacattaattaacccgaacaatacgggcaaaaaacattcatgataaaaatatttattggtcattatattaacgtattttatagcactgccgatatcacgctcaaaaaacaaccactgctatttttagcaaagcttatggtatactccgccgccttaacatttttcaccgcaaattttcattgcaacatgacgaggaaaataaatgagtacgcctgatttttctactgccgagaataatcaagaactggcaaatgaagtctcctgcctgaaagcgatgctgacgctgatgctgcaggcgatgggacaagctgacgcgggccgcgtgatgttaaagatggaaaaacagcttgcgctgatcgaagacgaaacccaggctgcagtattttccaaaacggttaagcaaattaaacaagcctaccgtcagtaatataaaaccggctgatagcgtgcctttcagccggtttttgcatctggcacgcaggacagaaaagagatcaaattaagccagtagcggccgcgtaacaggcaacctgggtcttatttggtgcattaatttttttctgcatgtttttctggtggaaattgaccgtattctcagagattgacaaaatcatcgctatctctgctgatgttttcccttccgccgtccacctcagaatttctttttcgcgcttgctgaaattcatctctggcgtcatcactatttcatcatttaaacgcatcagagccatcagactttcgcgcaccagtaactgcatttttaattgcagttcatcactaagaatgggtatttcgcgcgcgctgcaacgggaaaaggacaaaaagcccagcgcccggtttggcagcattaaatactgagtgacaccgcggcgtaaaccatgtgcgcgcgcggcttcccataacggctgtgcttcgctgaataagtcatcattccacattaaatggccctgactaaagttttcagggttcagcaccggatcaattgcgagaaagttttttgcctgataataactaacccacgcctcagggtaattggtgtaaaaagccactttaggtcgagtgaatggtaccgggtggcggacacataacgaatagtaatcgtactccagctgctgagcctgaagctcaatttcatggtagacctcttctgcggtctccatcctctgaaaacgcaacagcatcgtgcgacgccagctgaaaaaatccttatcctgcatagtaaaccgcaacgcccctgagagtgagtatcatttataatgataattcaaactatcacataaataagatttatatataatttatattattcaggcaatgaattacttttgcaagccatcgcattctcttatgttattaatgagttatgctgatttgttaagcagttttatcaggcttgaaatggcgtccagccccgacaggtgaatcgtcggggctgattttttcttattattgcagcagaaacttctcgaggaactggcgggtgcgaggctgctcggggtcggcaaataacgcttttgcggccccctgctcgactatccgcccctggtccataaagatcgcccggtccgcaacatcccgggcaaagctcatttcgtgcgtcacaatcaccatcgtgcgcttttcctgcgccagctgacggatggtgttcaggacttcacccaccagctctggatccagcgctgacgttggctcgtcaaacaaaatcacctcaggacgcattgccagcgcacgcgcaatcgcaacacgctgctgttgaccgccagacaaacgacgtggatagctggtttctttacctgccagcccaacttttgccagcagctcgcgagcgcgcgccgtggcctcttctttcggttcacctttgacgatcaccggcccttcaataatgttctccagcaccgtacgatgcggaaacaaattaaagttctggaagacaaacccgacgtgctgacgcaactggcgaatcagagatttttgctgacttaatgaacgtgcagtatcaatagtgatatcgccaacggtgatcgttcccgcttcgggttgttccagcagatttatgctgcgtagcaacgtggttttgccggaaccactcggaccgataattgccaccacttcgccaggctttacctcaaggtcgataccgtgcagcaccgtctgaccgtggaattttttcaccaggttcttaacttcaatggcactcattttggttctctctcctggcgattaagttgattctcaaaatggttctgcaacgtcgataacacagtcgccatgatccagtagatgagcgaagccgccagatacatggtgaacacctccagcgtacgcgaggtaatcaactgcgcctgacggaacagctccggcacctggattgtcgcggccagcgacgtatcttttaccaggctaataaagctgttcgacagcggcggcaacgccacacgcgccgcctgtggcaaaatcgcgcgacgcatggtctgccacggcgtcataccaatactggctgccgcttcccactgacctttatcaatagaagaaatggcggcgcgcagcgtttcggcagcataggcggcagtgttcaacgacagaccaatcattgctgacggaatgggatctaattcgataccaaactgcggcaggccgtaatagatcataaacagttgtgcgatgagcggcgtaccacgaaaaatagagatataaaaacgcgccagccagcgcacgggccagattggcgacagacgcatcagcgcgagaataaacccgagcagtaagccaaaaaacatgccgccgatactgagttgcagcgtatacccagcccctttcagcaggaacggcaaggaatcaataaccagttgtatactttcttgcatgagcgtttccggagctaaacgtggggatgataggcgaacagcgcaggcgcaccgccggtatgaataaacagaatcggcccttcatctttgaagcgtttctgactgataccgtcaatcagccccgccatcgcttttccggtatacacaggatcaagcagaatgccttccagccgcgccagcaatttcactgcttccatgccttcgtcgttcggcacgccgtagccaggtgcaaaatagtcatcccagagtaaaatttccgctgatgcggtcagctccagttctttcgcaatcgcctgttgtaggttaaccactttcggcaattgatcggcaacggaacgcgacacggtcacgccaatcagttcgctttcaggcatcaggtgttccagcccaacagccagtccggcgtgagttccggcactgcccgatgcgactaccaccgatgaaatattaaccgccccttcacactgttgcgcgatttccagcgcactctccacataacctagcgcgccaagagcattagaaccgccaaccggaatgacatacgggcgaaagccttgtgcttcgactcgcgtcgccagctcttccagttgggcattgggatcggtcagtgcgtcgcacatttcaatctgggtattgaacagatccagcaacaagcgattgccgttggttaaatagttttctgcggttgtgccaataggattttccagcagcgccacgcagtgcagaccgagtttggcagcgactgcggcagtctgccgcacatggttagactggatcgccccggcagtaatcagcgtatcggcaccttcacgcagagcatctgccgcgagaaattccagcttacgtaatttattgccgcccattgccatgggggtgacgtcatcccgtttgatgaaaatttcccgtcctagataatcagaaaagcgcggcagatattcgagcggcgttggcgcgccgataaactccagccgtggaaaacgggttaaattatgcagtggcataacagcctccgatgtgtgttgttgtgattttcttattatgcacgctgaaaacgcgtaaataaaaaaggcgctagtgaaagcgcccttttttgtcattatgctgattatttggtcacatcagcaccaaaccatttttcggaaagggcttgcagagtgccatctttttgcatttccgcaattgcatcattcactgctttcagcaggtcctcatttcctttacgcagcgccacgccagactcctgacgggagaatgcttcaccggttactgccagcgtatcgttggttttcttcaccagatccagcgccgccagacgatcaacgaggatcgcatcgatacgccctacgcgcagatcctgatatttggtcgggtcatcatcataggtacgcacatcgacgccctgaacattctgccgcagccactcttcatagttggtgcccagaccgacccccacttttttgcctttcagatcatcggctgttttaatggtgccttcgttaccttttttcaccagcgcctgaataccagaaatggtgtacggggttgagaaatcgtattttttcttgcgctcatcagaaatggtgacctgattaatcaccacatcaatacgtttagagtccagcgacgccagcataccgtcccatttggtcggttttagtgacgcctcaacgccaagatgttttgccagctgttgggcaaattccacttcaaaaccggttaatttgccgtcatctccctgaaaactgaacggcggataagttccttccagccctaccagcagcgtgccgcgctctttaactttattaagcagaccttcatctgcaaaacttttaacgctcatgcccgcaaccagcgccacggccatcacacccatcaatgcctgacgtcccagatgtgctaatttcatattcaccccgaatgttgttatgtctgtttgcagtgtagagccattgtttgtaaacacaaaaacaactccgctacatcttattcttatttaatatatatcagaagaaggcaggctggaggatttctgcacaagtctggtacaggtttggcgctgatagtgttgatacttccgtaacgcgatgcggtaattgttggtgctggtggtgggcagccacggggcgaggatttcatcaaggaaaccgtcctgcagctgatcgagggaaatattttgctcgtgtagatgattccccaaacggcgcaaacgaacgacatattcacgcaccgtacctgggctcatttcagtttgctcaaaaagaaattgcttaaagccgataatatcgaaaaaatcactctgcgttttgcaatgtaaatcaccgcaaaatcggcacaatgccgcccatgatttttgttccgtttgccagccattttcatcaagcagcgtgtccaggcgggaaatctcgattttattcactattttgccgtcgcgaactaaggtaatgcgatcgagtaatttacggcaatgcgcgcaatgggtctggctgtgtttaaagtctttaagatagcggcttaatggccgtcttttcaggtgctgcaccatcattaagaactcctggtagtcaaagttaaagtgcggcatttactgacgttataacttacccagtttagtgcgtaaccgtttaatagcctggctgtgtaactgactgacccgcgattccccgacctccagcaccgcgccaatctctttgagattcagctcttcctggtaatagagggttaataccagtttttcgcgctccggcaacgtttcgatggcttccatcacccgctggcgcagattactgtccagtagttgttgtagcgggttttctcgctgatgatcatcagtaaccagttcgatgctatcgccgtgctcttcgcgccactcatcgtaggagaagagctggctgttattggtgtcgagcaacatttggcgataatcggcaatatcgatccctaaacgttccgctacctcagtttccgtggcgttgcggccaagttcctgctccagttgccctattgcctgtgccacttcacgcgcgttgcgtcgcacgctgcgcggcacccagtcacggctgcgaagttcatccagcatagcgccacggatacgctgcactgcgtaagttgtaaatgccgttccttgtagggcgtcatagcgttcgacggcattaagtaacccaatgccgcccgcctgtagcagatcgtcaagttccacgctcgcgggcagtcgaacctgcaggcgcaatgcttcgtgacgcaccagcgggacataacgctgccacagcgagtgtttatccattacaccttcagcggtatagagtgaattcacgataaacagccctgcgttatatgagttatcggcatgattatccgtttctgcagggtttttaatcggacgattagtgggtgaaatgaggggttatttgggggttacaggtaaattccaggcagaaaaaaaccccgccggtggcggggaagcacgttgctgacaaattgcgctttatgttgccggatgcggcgtaaacgccttatccggcctacaaaaatgtgcaaattcaataaattgcaattcaacttgtaggcctgataagcgcagcgcatcaggcaatttggcgttgccgtcagtctcagttaatcaggttacaacgattaaccctgcagcagagacagaacctgctgcggtacctggttagcttttgccaacacggagttaccggcctgctggatgatctgcgctttcgacatattggacacttcggtcgcatagtcggcgtcctgaatacgggactgcgcttcagacaggttggtagtggtgttgttcaggttggtaaccgcggaatccagacggttttgcaccgcaccgagggaagaacggaatttgtctacagatgcgatagcatcgtccagcgctttcagcggatccgtggttttaccatttgcaacagcagtcagagcctcaccaccagcagtcaaacctgtttgcagattaccgccatttaaatcggcagaatcgtatgttttaccatcaatatcgaccacttctgttttgccatcatctccgcccagtttgaccgcggttggagaactggcggcaccggaagagtcagtataggtaatagttttaacagaaacagcaccagtagtttcattcacatccgcagcgtaaagattgccatttgtatctttaagcgcatatgtatcggtatcattacccttggaatcctgcagttttactaagctaacagcaccaaggttggcagttgcggaacctgcagtattatcaatctgaacaggtgtaccgcctgaagtgatagttgtagctttagtagtatttgcatcagttacagttgcatttgccgttgctccagtcgccattgtcactgtaccatcattagcaactgttactgcgtaatacttcccatcgttatcaccaccggtgattttcgcatagtaatcattaccattatcagtataaacaccctcaattgaagctgggttagttccgccagtatcagtggctgcttccgtagaaagggtaattccagtaagtttaatattgtttgtggtggtagcaccaaaagcagttactggagcactagtggtaactgtatcgttatttttaacgctaaaaccatcaaggccaagagttttagcatcaatctgcttcagatcgatagtgatagtctggttatcatttgcgccaacctggattttcatggagccattttttgccagcacgttcacgccgttgaactgggtctgaccagatacgcggtcaatttcatccagacgggatttaatttcgtcctggatagaagacagatcagactcagagttagtaccggtagtggcctgtaccgtcagttcacgcacacgctgtaagttgttgttgatttcggacagcgcgccttcggtggtctgcgcaacggagataccgtcgttggcgttacgggccgcctgagtcaggcctttaatgttagaggtgaaacggttagcaatcgcctgacccgctgcgtcatccttcgcgctgttaatacgcaagccagaagacagacgctcgatagaactcgacagcgcagactggttcttgttgatattattttgagtgatcagcgagaggctgttggtattaatgacttgtgccatgattcgttatcctatattgcaagtcgttgattacgtattgggtttccacccgtcggctcaatcgccgtcaaccctgttatcgtctgtcgtaaaacaacctttagaatttttttcaaaaacagccattttttgttagtcgccgaaatactcttttctctgccccttattcccgctattaaaaaaaacaattaaacgtaaactttgcgcaattcagaccgataaccccggtattcgttttacgtgtcgaaagataaaaggaaatcgcatggcaagtatttcatcgctgggagtcgggtcaggtctggatttaagttccatccttgatagcctcaccgccgcgcaaaaagcgacgctaacccccatttcaaatcagcaatcgtcgtttaccgctaaacttagcgcctacggtacgctgaaaagcgcgctgacgactttccagaccgccaatactgcattgtctaaagccgatcttttttccgccaccagcaccaccagcagcaccaccgcgttcagtgccaccactgcgggtaacgccatcgccgggaaatacaccatcagcgtcacccatctggcgcaggcgcaaaccctgaccacgcgcaccaccagagacgatacgaaaacggcgatcgccaccagcgacagtaaactcaccattcaacaaggcggcgacaaagatccgattaccattgatatcagcgcggctaactcatcgttaagcgggatccgtgatgccatcaacaacgcaaaagcaggcgtaagcgcaagcatcattaacgtgggtaacggtgaatatcgtctgtcagtcacatcaaatgacaccggccttgataatgcgatgacactctcggtcagcggtgatgatgcgctacaaagttttatgggctatgacgccagtgccagcagcaacggtatggaggtctcggttgccgcccagaatgcgcagctgacagtcaacaacgtcgccatcgagaacagcagcaacaccatcagcgacgcgctggaaaacatcaccctgaacctgaacgatgtcaccacgggcaaccagacgctaaccatcactcaggacacctccaaagcgcaaacggcgattaaagactgggtgaatgcctacaactcgctaatagataccttcagcagcctgaccaaatacaccgccgtagatgcgggagctgatagccagagttctagcaatggtgcactgctcggcgactccacgctgcggacgattcagacgcagttgaaatcgatgctgagtaataccgtcagttcttccagctataaaacgttggcgcagattggtatcacgaccgatcccagcgatggcaaactggaactggatgccgacaaactcaccgctgcactgaaaaaagatgccagcggcgtaggtgcattgattgttggcgatggtaaaaaaaccggcatcacgaccaccatcggcagcaacctgaccagttggctttcgacaacgggcattattaaagccgctaccgatggcgttagtaagaccctgaataaattaactaaagactacaacgccgccagcgatcgcattgatgcgcaggtcgctcgctacaaagaacaatttacccaactggacgttttaatgacctcgttaaacagcaccagcagctacttaacgcagcagttcgaaaacaacagtaattccaagtaagcaatattcatcgggagacaggtcatgtacgcggcaaaaggcacccaggcctatgcacaaattggcgtcgaaagcgccgtaatgagcgccagccagcagcagctggtcaccatgctatttgatggagtgctgagcgcactggttagagcgagcctgtttatgcaggacaacaatcagcaaggcaaaggcgtctctttgtcaaaagcgatcaacatcattgagaacggactgcgggtgagtcttgatgaagagagcaaagacgaactaacccaaaacttgattgctctttatagctatatggtcaggcgcttgctgcaagccaatttacgcaacgatgtctccgcagtcgaagaagtggaagcattaatgcgcaatattgccgatgcctggaaagagtcgttactctccccttctttgattcaggacccagtctgatgaaccatgcaccgcatttatatttcgcctggcaacaactcgtcgaaaaaagccagctcatgttacgcctggcaacggaagaacaatgggacgaactcatcgccagcgaaatggcgtatgtgaatgcggtgcaggagattgcacatttgactgaagaggttgacccgtccaccacgatgcaggagcagctccgcccgatgctgcgcctgattctcgacaacgaaagcaaggtaaagcagttattacagattcggatggatgaactggcgaaactggtcggtcagtcatcggtgcaaaaatcggtgttaagtgcctatggcgatcagggcggctttgtgctggctccgcaggataacctcttttgaatctgaatgagtcgatggctcgcgaataatccgattacggctacgcttctaatgttccccttgaatggagtcgaagaatgcgtaatcccacgctgttacaatgttttcactggtattacccggaaggcggtaagctctggcctgaactggccgagcgcgccgacggttttaatgatattggtatcaatatggtctggttgccgcccgcctataaaggcgcatcgggcgggtattcggtcggctacgactcctatgatttatttgatttaggcgagtttgatcagaaaggcagcatccctactaaatatggcgataaagcacaactgctggccgccattgatgctctgaaacgtaatgacattgcggtgctgttggatgtggtagtcaaccacaaaatgggcgcggatgaaaaagaagctattcgcgtgcagcgtgtaaatgctgatgaccgtacgcaaattgacgaagaaatcattgagtgtgaaggctggacgcgttacaccttccccgcccgtgccgggcaatactcgcagtttatctgggatttcaaatgttttagcggtatcgaccatatcgaaaaccctgacgaagatggcatttttaaaattgttaacgactacaccggcgaaggctggaacgatcaggttgatgatgaattaggtaatttcgattatctgatgggcgagaatatcgattttcgcaatcatgccgtgacggaagagattaaatactgggcgcgctgggtgatggaacaaacgcaatgcgacggttttcgtcttgatgcggtcaaacatattccagcctggttttataaagagtggatcgaacacgtacaggaagttgcgccaaagccgctgtttattgtggcggagtactggtcgcatgaagttgataagctgcaaacgtatattgatcaggtggaaggcaaaaccatgctgtttgatgcgccgctgcagatgaaattccatgaagcatcgcgcatggggcgcgactacgacatgacgcagattttcacgggtacattagtggaagccgatcctttccacgccgtgacgctcgttgccaatcacgacacccaaccgttgcaagccctcgaagcgccggtcgaaccgtggtttaaaccgctggcgtatgccttaattttgttgcgggaaaatggcgttccttcggtattctatccggacctctacggtgcgcattacgaagatgtcggtggtgacgggcaaacctatccgatagatatgccaataatcgaacagcttgatgagttaattctcgcccgtcagcgtttcgcccacggtgtacagacgttatttttcgaccatccgaactgcattgcctttagccgcagtggcaccgacgaatttcccggctgcgtggtggtcatgtcgaacggggatgatggcgaaaaaaccattcatctgggagagaattacggcaataaaacctggcgtgattttctggggaaccggcaagagagagtagtgaccgacgaaaacggcgaagcaaccttcttttgcaacggcggcagcgtcagcgtgtgggttatcgaagaggtgatttaaattcatccccggcggcaagccggggagatttcattacggcagtggcgtcggtaacggcgctttatccagcgcggcggcacactctgctgtcgggcgatccacacgctccatcgtcataccatcgtactcaatggtgttaccgtcacgctcaacctcgtacagctcacgttttacggtaacgttagtgagatcatcagacatcaatgtcaacttacccggcacggcaatcacccgctgccactgacggcaatccagggtatcgccctctttagtgacaatcaggctgcctatcgcttccgggctgaccagcgcacgttgcggccctttggtctgccagtagcccgccagccagtccggcgcgggggttttcacgacattgttatagttttcgacttcggcacagcccgccagcaacaagagcgcgcctgcaattgcgagttttttcatcattcgtcctgcatgagaagaaaagaggattgtggcattaaagccctgatgtcgccagcctttcaaggttcagagagaaatttgatctaactattatttttgtgaattattaccccgaaaataaatttgcatggtgtatgattcgcgactcttgtttcaaaccttctgagttcagaggctacattcatgtcatggcagcaattcaaacacgcctggttgattaaattctgggcccccatccctgcggtcatcgcggcgggtattctctctacttactattttggcattactggcaccttttgggctgtcacgggtgaatttacccgttggggcggccagctcctgcaactgttcggcgtccatgctgaagagtggggttactttaaaattatccatctggaaggatcgccattaacccgcatcgacgggatgatgatcctcggtatgtttggcggctgctttgccgcagcgctgtgggccaacaatgtcaaactgcgaatgccgcgcagccgtatccgcattatgcaggccatcattggcggcattatcgccggttttggcgcgcgtctggcaatgggctgtaacctggcggcgttctttaccggtattcctcagttctcgctgcatgcctggttctttgccatcgccactgccattggttcatggtttggcgcgcgctttaccctgctgcccatcttccgtattcccgtgaaaatgcagaaagtttctgccgcctcaccgctgacgcaaaaaccggatcaggcgcggcgtcgttttcgtctcgggatgctggtctttttcggcatgctgggctgggcgctgctcacagcgatgaaccaacccaaactggggctggcaatgctgtttggcgtcggctttggtttactgattgaacgtgcgcaaatctgctttacttcagcgttccgcgatatgtggatcaccggacgtacccatatggcgaaagcaatcattatcggtatggcggtgagtgccatcgggatcttcagttacgtacagttaggcgttgaacccaaaatcatgtgggcgggaccaaacgcggtaattggtggtttactgtttggttttggcatcgtgctggctggcggctgcgaaaccggctggatgtaccgcgcggtagaaggccaggtgcactactggtgggtcggtctgggcaatgtgatcggctcaacgattctggcgtattactgggatgatttcgctccggcgctggccaccgactgggacaaaatcaacctgctgaaaacctttggtccgatgggtggcctgctggtgacatatttgctgttgtttgctgcgctgatgttgattatcggctgggaaaaacgcttcttccgccgtgcggcaccgcagactgctaaggagatcgcatgaaaaatatcgttcctgattaccgccttgatatggtgggtgaaccctgcccttatccggcagtcgcaacccttgaggcgatgccgcagttaaaaaaaggggaaatcctggaagtggtgagcgactgtccgcagtcgatcaataatattccactggatgcgcgtaatcacggctatacggtgctggatattcagcaagacgggccgaccattcgttatttaattcagaagtaatccctcattcccgctgtgacccacagcgggaacatcgttacctttgtatcacatagattttacccgcccccactcctattcttttcagtatgatctcaggaggtttctatgtgtggacgctttgcccaatcccaaacgcgtgaagattaccttgcgcttctcgcggaagatattgaacgcgatattccctatgatcccgaacccattggcagatacaacgtcgcgccgggaaccaaagtcctactgctcagtgaacgtgatgaacaccttcatctggatccggttttctggggatatgctcccggatggtgggataaaccgccgctgattaacgcccgcgtagaaactgcggcaaccagtcgtatgtttaaaccgctctggcaacatggtcgggcaatctgttttgccgatggctggtttgagtggaaaaaagaaggcgacaaaaaacagcctttttttatctatcgtgctgatggacaacctatttttatggccgcgataggtagcacaccatttgagcgtggtgacgaagccgaaggatttttgatcgtcactgctgcggcagatcaaggtctggtagatattcatgaccgccgcccactggtactgtcgccagaagctgcgcgggaatggatgcggcaagagattagcggtaaagaagcctcagaaatcgcggccagtggctgtgttccagcaaaccagttctcctggcacccggtatcgcgcgcggtgggtaatgttaaaaaccagggcgcggagttaattcaacctgtttgataagcctggagattattgatcaacaatactgcgtcataagaaatctctattagacaaagatttcattacctgttggcatattgcaaaaataacaccaatacggaatcgtcatgttcacgattaaaacagatgatctcacccatccagcagtgcaagcattagtggcttaccatatttccggcatgctgcagcagtctccccccgaaagcagtcatgctttagatgtgcaaaaattacgtaacccgacagtgacattctggtcagtatgggaaggcgaacaactcgcaggaattggtgcgctgaagttgctggatgataaacacggcgagctgaaatcaatgcgtaccgcgccaaattatttacgtcgtggtgtcgccagtctgattttacgccacattttgcaggtcgcccaggacagatgccttcatcgcctgagcttagaaacgggtacacaggctggatttacggcctgccatcaactttatttgaagcatggtttcgctgattgcgaaccgtttgctgattatcgacttgatccacacagtcgatttttatcattgacgctatgcgaaaataatgaattgccatgagccagacgcagcacattcttgcattcgacgtgctgcgcctttatttatcaccagcaggaaacgccttgtccatagacgccccttccacatgcgccacaagaaacctctattccagtgacacaattgcgcctaattaattacatttaatatttaattatgagttcctcaccatctattacatactttttaaccatatcggaatatttatcataatcagcgggattcgtaacaatatattttcgctgcgatctttcatagcaaatccctgtcaaagtccatgatataaaaatgtctcttcaaaagaattacattctttaaaaagtaattctttattgctatatatcgcagagacaacctcaatatcacactccatacgtgctttctccagatgatttgggaagtattgaatttcttttatcttattatcgccacaattaaacagcttagtagtctcaggcattgctggtatttaccatattttattgcgataaatagaaattgtcatagcctttgacggagatgagtcaacacgcgatatcagattattatctacggagacctgggtaattccatcggatacttttggaaataccatataattattgaaatcgagctctaattctttgcagaatttgggaatttgtattgtggcaaggccattatgacgaagataaagcacctcaatccaggatggaagaggtggcaaagaccccaagtgaagatctgttaagtcaagtttactattgtggagttcaacacatttaaacaatctcaccaatgctatatccacattttttttgaagtcattcgatgcgccttcttttactgaattagcccagtcgctgaaacctttgcaaagtctggaatctgtaattttcgtaaagttgtctagaaactctgcaatattagtcgatataaactctaatttatgccgaatgggtgggttaccagttccctgattttttctatcatgataaaacctatcttattataaatcgagaaatcttgaaaccagagactataatcaccccattcgaaatattctgagtgcaataacttaaattctgacagcatattaaataatttgctgtcttcactaattggtgtaaacttaccatttccaagacaactgactaactcacttgataattcatttatgattgcatcatcagatactaactcatgttgttttatcgtagattcagtattagatgtgactttatttaattgaaccggctgagtttttaacgaaagatcatttaatggaaacatttacactcctgtttaataaattatattgcccagggcgcattctaaaacacaataaaattaccactatcaaaaatcgctcatatccatcgcccggaatatgaataaaaacatcaacaaagattaaattatccagaggttactgttgcgtctgtggtcgtaacaacatccgacgtggtgatgtgtcaaatgagacgctctgatgttcaggggggttatcgcgtatacggatcgtggatggcagaaaacgttcaggatcaggtatccattttaaaccagaaattgagtgagtttgccccatccatgccccacgcggtgagatcggatgtaattaacaacaggttacaaaacctacacctgcatgctcatcacttcctgatacgccgccaccagcttattacgcacctgaatccccatttgcatagaaactgaggctttttgcatatcggtcatcacatcgtttaacgccacgccgggttcaccgagagtgaatttttctgcctgcgtgcgggcagctgtttgtgtatcactaatgcgatcgagcgcggcgtgcagctgcccggcaaaactaatggtcggttgcggcagtgattcctgcgcacgcgcactcatcgccgtagcctgtaactggctgataaccccttcaatcccctgtatcgctgacattctcgtctcccggataatttctggtagcaaagcctaccagtaagtcaataagacaaaggcgctaaatagcaacaaaaaaacgggtttattggcggatagaaaaaaacgaaagcacaaataatgggagcgtcaatttttcgagtttgctgacccgggagtgagtcttgttccactttgccaataacgccgtccataatcagccacgaggtgcgcgatgaatgcgactgcagcccagacaaaatctcttgagtggcttaatcgcctgcgtgcgaatccgaaaattccattgattgttgccggttccgcggcagtggcggtcatggtcgcactgatcctgtgggcgaaagcccccgactaccgcacattattcagcaatctttccgatcaggatggtggcgcaattgtcagccaactgacgcaaatgaatattccttaccgcttcagcgaagccagcggcgctattgaagttccggcagataaagttcacgaactgcgtctgcgcctggcacaacaaggtttgccaaaaggcggcgcggtcggtttcgaactgcttgatcaggaaaagtttggtatcagccagttcagcgaacaggtgaattatcagcgggcgctggaaggcgagctttctcgtaccatcgaaactatcggcccggtaaaaggggcgcgcgtacatctggcaatgccgaaaccgtctttattcgtccgtgaacaaaaatccccttctgcatcggtgacggtaaatctgttacccggccgcgcactcgatgaagggcaaattagcgccattgtgcatctggtttccagcgccgttgctggtctgccgccgggaaacgtcacgctggtggatcagggcggacatctgttaacccagtccaataccagcgggcgcgatcttaatgacgctcagttgaaatatgccagcgatgtcgaaggccgtattcagcggcgtattgaagcgatcctgtcgcctattgttggtaacggtaatattcacgcccaggttacggcgcagctggacttcgccagtaaagaacaaacggaagaacagtatcgccctaacggtgatgaatctcatgcggcgcttcgttcacgccagcttaatgagagcgagcaaagcggttccggttatccgggcggcgtaccgggggcgttgtcgaatcaaccggcacctgcgaataacgcgccaatcagcacgcctccggcaaatcaaaataaccgccagcagcaggcgagcaccaccagcaatagtgggccgcgtagcacacagcggaatgaaaccagtaactacgaagtcgatcgcaccattcgtcataccaaaatgaacgtgggcgatgtgcaacgtctgtcagtcgcggtcgtggtgaattacaaaaccttgccagatggcaaaccgttgcctctcagcaacgaacagatgaagcaaattgaagatctgacccgcgaggcgatgggcttttctgaaaaacgcggtgactcgctcaatgtcgttaactcgccgttcaatagcagtgacgaaagcggcggagaactgccattctggcaacagcaagcgtttatcgatcagttacttgctgccggtcgctggttgctggtactgctggtggcgtggctgctgtggcggaaagcggtacgtccgcagctaacacgtcgcgctgaggcgatgaaagctgtacagcaacaggcgcaggcccgcgaggaagtggaagatgcggtggaagtccgcctgagcaaagacgaacaactacaacaacggcgcgctaaccaacgtctgggggcagaagtcatgagccagcgtatccgtgaaatgtctgataacgatccgcgcgtggtggcgctggtcattcgccagtggataaataacgatcatgagtaacctgacaggcaccgataaaagcgtcatcctgctgatgaccattggcgaagaccgggcggcagaggtgttcaagcacctctcccagcgtgaagtacaaaccctgagcgctgcaatggcgaacgtcacgcagatctccaacaagcagctaaccgatgtgctggcggagtttgagcaagaagctgaacagtttgccgcactgaatatcaacgccaacgattatctgcgctcggtattggtcaaagctctgggtgaagaacgtgccgccagcctgctggaagatattctcgaaactcgcgataccgccagcggtattgaaacgctcaactttatggagccacagagcgccgccgatctgattcgcgatgagcatccgcaaattatcgccaccattctggtgcatctgaagcgcgcccaagccgccgatattctggcgttgttcgatgaacgtctgcgccacgacgtgatgttgcgtatcgccacctttggcggcgtgcagccagccgcgctggcggagctgaccgaagtactgaatggcttgctcgacggtcagaatctcaagcgcagcaaaatgggcggcgtgagaacggcagccgaaattatcaacctgatgaaaactcagcaggaagaagccgttattaccgccgtgcgtgaattcgacggcgagctggcgcagaaaatcatcgacgagatgttcctgttcgagaatctggtggatgtcgacgatcgcagcattcagcgtctgttgcaggaagtggattccgaatcgctgttgatcgcgctgaaaggagccgagcagccactgcgcgagaaattcttgcgcaatatgtcgcagcgtgccgccgatattctgcgcgacgatctcgccaaccgtggtccggtgcgtctgtcgcaggtggaaaacgaacagaaagcgattctgctgattgtgcgccgccttgccgaaactggcgagatggtaattggcagcggcgaggatacctatgtctgataatctgccgtggaaaacctggacgccggacgatctcgcgccaccacaggcagagtttgtgcccatagtcgagccggaagaaaccatcattgaagaggctgaacccagccttgagcagcaactggcgcaactgcaaatgcaggcccatgagcaaggttatcaggcgggtattgccgaaggtcgccagcaaggtcataagcagggctatcaggaaggactggcccaggggctggagcaaggtctggcagaggcgaagtctcaacaagcgccaattcatgcccggatgcagcaactggtcagcgaatttcaaactacccttgatgcacttgatagtgtgatagcgtcgcgcctgatgcagatggcgctggaggcggcacgtcaggtcatcggtcagacgccaacggtggataactcggcactgatcaaacagatccaacagttgttgcagcaagaaccgttattcagcggtaaaccacagctgcgcgtgcacccggatgatctgcaacgtgtggatgatatgctcggcgctaccttaagtttgcatggctggcgcttgcggggcgatcccaccctccatcctggcggctgtaaagtctccgccgatgaaggcgatctcgacgccagtgtcgccactcgctggcaagaactctgccgtctggcagcaccaggagtggtgtaatgaccacgcgcctgactcgctggctaaccacgctggataactttgaagccaaaatggcgcagttgcctgcggtacgtcgctacgggcgattaacccgcgctaccgggctggtgctggaagccaccggattacaattgccgctcggcgcaacctgtgtcattgagcgccagaacggcagcgaaacgcacgaagtagaaagcgaagtcgttggctttaacggtcaacggctgtttttaatgccgctggaggaagtcgaaggtgtcctgcccggcgcgcgtgtttatgccaaaaacatttcggcagaagggctgcaaagcggcaagcagttgccgctcggtccggcgttattaggtcgcgttctggacggcagcggtaaaccgctcgatggcctgccctcccccgatacgacggaaaccggtgcgctgattaccccgccatttaacccgttgcaacgtacaccgattgaacatgtgctggacaccggcgtgcgcccaatcaatgccctgcttaccgttgggcgtgggcagcgtatggggctgtttgccgggtccggcgttggtaaaagtgtgctgctggggatgatggcacgttacacccgcgccgatgtcattgtcgtgggtttgattggtgaacgtgggcgcgaagtaaaagattttattgagaacatcctcggtgccgaagggcgtgcacgctcagtggtgattgccgctccggcggatgtttctccgctcctgcgaatgcagggtgccgcctatgccacgcgcattgccgaagattttcgcgatcgtggtcagcatgtgttgctgattatggactccctcacccgctacgcgatggcccagcgtgaaattgcgctggcgattggcgaaccccccgccaccaaaggttatccaccgtcggtgtttgccaaattaccggcactggtcgagcgtgccggaaatggcattagcggcggcggctcgattaccgcgttttataccgtgctcactgaaggcgatgaccagcaggatccgattgccgactccgcgcgggcgatcctcgacggtcacattgtgctgtctcgccgactggcggaagccgggcactatccggctatcgatattgaagcgtcgatcagccgcgcaatgacggcgttgatcagtgagcaacattacgcgcgagtgcgcaccttcaaacagctgttgtcgagttttcagcgtaaccgcgatctggttagcgtcggcgcgtatgccaaaggcagcgatccgatgctcgataaagccatcgccctgtggccgcagctggagggctatttgcaacaaggcatttttgaacgcgcggactgggaagcgtctctccaggggctggagcgtattttcccgacagtgtcataacccaggagataacggcagatggcagaacatggtgcgctggcgaccctgaaagatctggcagaaaaagaggtagaggatgccgcgcgcctgctgggtgaaatgcgtcgcggatgtcagcaggcggaagaacagctcaaaatgctgattgattatcagaatgaatatcgcaataacctcaacagcgatatgagtgccgggataaccagcaaccgctggatcaactatcagcagtttatccagacgctggaaaaagccattactcagcatcgccagcaacttaatcagtggacgcagaaagttgacattgccctgaacagttggcgagaaaaaaaacaacgtttgcaggcctggcagacactgcaggaacggcaatccacggcggcactgcttgcagaaaaccgcctcgatcagaaaaagatggatgagttcgcccagcgcgccgccatgaggaaacctgaatgattcgcttagcgcccttgattaccgccgacgttgacaccaccacattgcctggcggcaaagccagcgatgctgcacaagattttctcgcgttgttgagcgaagcattagcaggcgagacaactaccgacaaagcggccccccagttgctggtggcaacagataagcccacgacaaaaggcgagccgctgatcagcgatattgtttccgacgcgcaacaagctaatttactgatccctgtggatgaaacaccgcctgtcatcaacgacgaacaatccacatcaacaccgttaaccaccgctcagacgatggcgttggctgcggtggctgacaaaaatacgacaaaagacgaaaaagcggatgatctgaatgaagacgtcaccgcaagcctgagcgccctttttgcgatgttgccgggttttgacaatacgcccaaagtgactgatgcgccgtcaaccgtgttaccgacagagaaaccaacgctcttcacaaaactgacttctgagcaactcacaacagcacagcctgatgacgcccccggcacaccagctcagccattaacaccgctggtagcagaagcccagagtaaagcggaagtcatcagcacaccttcaccggtgaccgctgccgccagcccgctaatcactccacaccagacacagccactgcccaccgtcgccgcacctgttttgagtgcaccgctgggttctcacgaatggcaacaatcattaagccagcatatttcgctgttcacccgccaggggcaacaaagtgcagagttgcgtctgcacccgcaggatttaggtgaagtgcaaatctccctcaaagtggatgataaccaggcgcaaatccagatggtttcaccgcatcagcatgtacgcgccgccctggaagcagcgctgccggtactgcgcacgcagctggccgaaagtggcattcagttagggcaaagcaacatcagtggcgaaagctttagtggtcagcagcaggccgcttcccagcaacagcaaagccaacgcacagcaaaccatgaacctctggcgggggaagacgacgatacgcttccggttcccgtctctttacaagggcgtgtaacaggcaacagcggcgttgatattttcgcctaacgtcagaggtagcaccgtaatccgcgtcttttccccgctttgttgcgctcaagacgcaggataattagccgataagcagtagcgacacaggaagaccgcaacacatgactgattacgcgataagcaagaaaagcaagcgatcgctttggatcccgattctggtattcattaccctcgcggcctgtgccagcgcaggttacagctactggcattcgcatcaggttgccgctgacgacaaagcgcagcaacgcgtcgtgccctcaccggtcttctacgcgctggataccttcacggtcaatttgggcgatgcggatcgcgtactttatatcggcataaccctgcgcctgaaagatgaagctacccgctcgcggctgagtgagtatttgccggaagtccgtagtcgcttgctgttactgttttcgcgtcaggatgctgccgtactggcgacagaagaaggcaagaaaaacctgattgccgagattaaaaccacactttccaccccgcttgttgccgggcaaccgaaacaggatgtcaccgacgtgctgtataccgcttttattctgcgataacgacatgggcgatagtattctttctcaagctgaaattgatgcgctgttgaatggtgacagcgaagtcaaagacgaaccgacagccagtgttagcggcgaaagtgacattcgtccgtacgatccgaatacccaacgacgggttgtgcgcgaacgtttgcaggcgctggaaatcattaatgagcgctttgcccgccattttcgtatggggctgttcaacctgctgcgtcgtagcccggatataaccgtcggggccatccgcattcagccgtaccatgaatttgcccgcaacctgccggtgccgaccaacctgaaccttatccatctgaaaccgctgcgcggcactgggctggtggtgttctcaccgagtctggtgtttatcgccgtggataacctgtttggcggcgatggacgcttcccgaccaaagtggaaggtcgcgagtttacccataccgaacagcgcgtcatcaaccgcatgttgaaactggcgcttgaaggctatagcgacgcctggaaggcgattaatccgctggaagttgagtacgtgcgttcggaaatgcaggtgaaatttaccaatatcaccacctcgccgaacgacattgtggttaacacgccgttccatgtggagattggcaacctgaccggcgaatttaatatctgcctgccattcagcatgatcgagccgctacgggaattgttggttaacccgccgctggaaaactcgcgtaatgaagatcagaactggcgcgataacctggtgcgccaggtgcagcattcacagctggagctggtcgccaactttgccgatatctcgctacgcctgtcgcagattttaaaactgaaccccggcgacgtcctgccgatagaaaaacccgatcgcatcatcgcccatgttgacggcgtcccggtgctgaccagtcagtatggcaccctcaacggtcagtatgcgttacggatagaacatttgattaacccgattttaaattctctgaacgaggaacagcccaaatgagtgacatgaataatccggccgatgacaacaacggcgcaatggacgatctgtgggctgaagcgttgagcgaacaaaaatcaaccagcagcaaaagcgctgccgagacggtgttccagcaatttggcggtggtgatgtcagcggaacgttgcaggatatcgacctgattatggatattccggtcaagctgaccgtcgagctgggccgtacgcggatgaccatcaaagagctgttgcgtctgacgcaagggtccgtcgtggcgctggacggtctggcgggcgaaccactggatattctgatcaacggttatttaatcgcccagggcgaagtggtggtcgttgccgataaatatggcgtgcggatcaccgatatcattactccgtctgagcgaatgcgccgcctgagccgttagtgatgaataaccacgctactgtgcaatcttccgcgccggtttctgctgcgccactgctgcaggtgagcggcgcactcatcgccattattgccctgatcctcgctgctgcctggctggtaaaacggttgggatttgcccctaaacgcactggcgttaacggtctgaaaattagcgccagtgcttcactgggcgcgcgtgaaagggttgtggtggtcgatgtggaagatgcacggctggtgctcggcgttaccgcaggtcaaatcaatctgctgcataaacttcccccttctgcaccaacggaagagataccgcagaccgattttcagtcggtcatgaaaaatttgcttaagcgtagcgggagatcctgatgcgtcgtttattgtctgtcgcacctgtccttctctggctgattacgcccctcgccttcgcgcaactgccgggtatcaccagccagccgctgcctggcggtggacaaagctggtcgctcccggtgcagacgctggtgttcatcacctcgttgacgtttattccggcaattttactgatgatgaccagtttcacccgcatcatcattgtttttggtttattgcgtaacgcgctgggaacaccctccgcgccacctaaccaggtattgctggggctggcactgtttttgaccttttttattatgtcaccggtgatcgacaaaatttatgtagatgcgtaccagccattcagcgaagagaaaatatcaatgcaggaggcgctggaaaaaggggcgcagccgctgcgtgagtttatgctgcgtcagacccgtgaggcagatttagggttgtttgccagactggcgaataccggcccgttgcagggacctgaagccgtgccgatgcgcattttgctcccggcctacgtgaccagcgagttgaaaaccgcatttcagataggcttcacgattttcatcccttttttgattatcgacctggtgatagccagcgtgttgatggcattggggatgatgatggttcccccagccaccattgctctgccctttaaactgatgctgtttgtactggtggatggctggcaattgctggtcggttcgctggcgcagagcttttacagctagagaggcaaaatgacacctgaatcggtcatgatgatggggactgaagcgatgaaagtcgcgctggcactggctgccccgctattgttggtagcgttggtcacgggccttatcatcagtattttgcaggccgccacgcagattaacgaaatgacgctgtcgtttattccgaaaatcatcgccgtatttatcgccattattattgccggaccgtggatgctcaatctgttgctggattacgtccgcaccttgttcactaacctgccgtatatcatcgggtagccgtactatgttgcaggtgacaagcgaacaatggctatcctggttaaacctgtacttctggccgttactgcgcgtgctggcgctgatctccaccgcgccgattctgagcgaacgcagcgtaccgaaacgggtaaaactgggtctggcaatgatgatcacgttcgccattgccccatcattacctgccaacgatgttcctgttttttcgttctttgctctgtggctggccgtgcagcagatcctgatcggcattgcgcttggttttaccatgcaatttgcctttgccgctgtgcgaaccgctggcgaaattatcggtctgcaaatggggctgtcatttgcgacgtttgtcgatccggccagccatcttaatatgcccgttttagcgcgtatcatggatatgctggcgttactgctgttcctgacatttaacggtcatttatggttgatttcactgctggtcgatacctttcacaccctgccgattggtggcgaaccgttgaacagcaatgcgtttctggcactcaccaaagcagggagtttgattttccttaacgggctgatgctggcgttaccgctcattactctgctgctgacactgaatctggcattaggtttacttaatcgtatggccccgcaattatccatttttgttattggatttccattaactctgactgtcggcatctctttaatggcggcattaatgccgttaattgcacctttttgcgaacatttattcagtgaaatttttaatttgctggctgatattattagtgaattgccattaatataattccgtaacgtttatcatgttatcctaaggattatccgaaaaataatacctacgaacatcttccaggatactcctgcagcgaaatatttgttttaagctcactcacatatcgcaacatttactttactttaagacaattccaggcaaattatacaacactttacgggatagtaagtccgcctgaaaaatcgcgagagtggcgcattaggtgacccatgttgttccgtttagtcatgatgaaatattcaggtaaggggaattatcgttacgcattgagtgagggtatgccatgtcaacgattattatggatttatgtagttacacccgactaggtttaaccgggtatctgttgagtagaggggttaaaaaaagagaaatcaacgacattgaaaccgttgatgaccttgccatagcttgtgattcacagcgcccttcagtggtgtttattaatgaggactgtttcatccacgatgcttctaacagtcagcgtatcaagctcatcattaatcaacatcccaatacgttatttatcgtttttatggcaattgccaatgttcattttgatgaatatctattggtcagaaaaaatttattgatcagttctaaatcgattaaaccggaatctctcgacgatatccttggcgatattctgaaaaaagagacaacgataacctcgtttttaaatatgccgacgttatcattgagccgaaccgaatcgagtatgttgcgaatgtggatggcaggtcagggaaccattcaaatctctgaccaaatgaatatcaaagccaagaccgtttcatcgcataaaggtaatattaaacgtaagatcaaaacgcataataaacaggttatctaccatgtcgtccgactgacggataatgtgactaatggtatttttgtcaacatgcgctaacacattctgactggtggtttcccaccagtcaggctgaataagattactctgctttctccacaaagataccgtcctgatgccctgcttcattaaagaaccagatgccgagcgggtagtcttccagcgaaaccaggtacattgtgccttcactaaactcctcaactgccagtaccacgccaggacgacgcggaccgccatccgttttgactgttacccgatcattcaccttcatcgttttcctcctgtggctttgtgccagtgtagaacaatttcgtttttctggcagcgccaggcgcgcgcgagtgctgattttctcgacggtctatacttaagagatgccaggcggacttaacgactggcggcaacaacagagtaacggttgcgaggaaagatgatgaaaaccgcaaaagagtacagcgataccgcaaaacgtgaggtcagcgtcgatgtcgatgccctgctggcggcgatcaatgaaattagcgaaagcgaagttcatcgcagccagaacgattctgaacacgttagcgtcgatggacgtgaatatcatacatggcgtgaattggcggatgccttcgaactggatattcatgacttcagcgtctctgaagtgaatcgttgaatgcacaataaaaaaatcccgaccctgagggggtcgggatgaaacttgcttaagcaagaagcacttaaaaaattcgttacaccaggaaatctgatgtgttcatcaccttatccgcaatttttttcgctgacaagaaaatattcgccatatgaatgattaacgctacttatgaatagaaatgtgacgcacgtcaccccttggtggctctggcgtcagcgggatcgctcccgaaaaaatcatctttgataatttgtgcggttttgagaatcatcctggtaagaggagtactgcgcgactatgttttcaattcaacaaccactactggtttttagcgatcttgatggcaccctgctggacagtcatagttatgactggcaaccggcagccccctggctcacccgtttacgcgaagcaaatgttcccgtcattctctgtagcagtaaaacatcagcggaaatgctgtacttgcaaaaaacgttggggctacaaggtttaccgctgattgccgaaaatggcgcagtgatccagcttgctgagcaatggcaggagatagacggttttccacgcatcatctcaggtattagccatggcgaaatcagcctggttttaaatacgctacgcgagaaagaacattttaaattcacgacttttgatgatgtcgacgatgcaaccatcgccgaatggacgggattaagccgtagccaggcggcgctgacgcagcttcatgaggcgtcggtaacgctaatctggcgcgacagtgacgagcgtatggcacaatttaccgctcgtctgaacgaactgggcttacagtttatgcagggtgcgcgcttctggcacgtactggatgcttctgccggaaaagatcaggctgccaactggattatcgcgacctatcaacaattgtcaggcaaacgcccaaccacacttggcctgggcgatgggccaaacgatgcgcccttactggaggtaatggattacgcggtgattgtgaaagggctaaatcgtgaaggggtgcatctgcatgatgaggatccggcccgcgtctggcgaacgcagcgtgaaggaccggaaggatggcgtgaagggctggaccattttttctccgcccgttaagcgttatcgctcgcgaatacccgattacgcccagcctgtttagcgagataaagccgacggtcggccagtgactggagttgttcaaaatcataatcaccggtttcctcgctgctgcttacccccagcgaggcactgatgcgtatcgtcgtactcttggcgatcaacatctctttttcatttaatttcagtcgaatacgttctgcgacctccgcagcctccgtcagactcgcgcctggcagaatcacacaaaactcctcaccaccgacccgcccggcaacgtcctgcgcacgcaaggaactgctaattaatccggcagcatgagaaagaacacggtcgcccgcctgatgaccaaagcggtcattaatcgctttaaaatggtcaagatcgacctgaatgacagaaaaaggatgttggtgcgtctgacacaatttagcgagcggacgggctttttcgaacagtgcgccacggttatataaacgcgttaaggtgtcgtgccacgcctgccactgcaacgagctttgcagaacatacatgttgctaaccatccggcgaatcacataccaggagatgagtaacatggtggtaaagagcgcccacagcagggttaatgcaatgctgatactgccgaaatcgccgcgcacgccttcgcttaacgtatggacacgcaccagcacaccgtcgaaatggtccagacgttcccagctaacatagcgactgtccatacgaatgccgccccgcgtgtcatgttccattgcctgcgccagcaaggccagttcacgaggatcaaaaatattccctgttggatggtcaggattggaagaggtcaaaaatctcagcttactgtcatagagctgatactcaccatcgaggtttttatcgatggcgtttcttaaaaattgctgcatagtacgcacgggaatactcatccccagcacgccataccagtagttattactgtctaccggaacactgacggtaacctgcggttcagtattgctggcgtgttccggttgcgaagtgaaccagcgtaccgcgcggtgacgattttctcgttgtgaatggccaataaaccagggttgggtgacatagccgtaataacgcgttggaacattgcgcgtaaacaaggtcggctgcgtcgaaacgtaaaatccggcacgcgagacatacatcgcctgttcaaccatcgacgaggagttgtgcgctagtcgcagcaagtaaccaacttccagtgcagcggtaatttcattgtcgaggctttcattttcgcgagacaggagattcccctcgctgactaatgcatccgacacaccattaactggcagagtgcgtcgtcggttgagttcgattttccaggcgtgctcgtcgcgatgctgttcgaactcggttacagcatcacgcagagaggtgaaatccagtggcgctacgagagcttcgcgcatgccattacgtaaaaagatcagtttgtcgacgttatactgcaaatgcttatcgagcgcgttggcaacgttttccagatgattacgctggctggagatataggcatcttccagcaccaccacttcacgccaggtgagcaaggtggaaaaaagcaataccacgataaagcagagattaacgacatgaccaggccccaggcggcgtgcgagttttttcaaccagctctggttttccatttttgtctcgtgctgcaccctgacgactcccaacctgcttttttatgattctggcataacctggcgatagcgtaccgcaaaacagcgataattttataatggtggcatgataagacgcgactatcattcattgcaggcattagcacaccaggccggatgtgatccggcctgatgttaatgataccctttcacacttcttccgcagaacgactcccctcccccggaacaagctcggtttcatgaaaagcttcccgcttgaccccgtaaccgtcataccaacgacactcaaccataccgctggagtatccagtgacaatcatccgcgggccgccctctttaaccgtaacttcctcactaaccataaagctcatactcgcctccttttttcgagtgaaacttgttcaccttagttgaagatggcgaattttgcataatagccagtgcgagtattaatgtgcctgaccgcgcattttctctacggctttcactcccagcaccacgatgccgccgatgataaatccaagaatcagatttaaaacagtcggtaatatcatcgccactactgcactttgctgcccggcgaaatgttcaatggcgtgatgcagcggcgcaattccatgtaccacaatcccaccgccgacgaggaacatcgccagcgtgccgacaatcgataacgctttcatcagccagggcgcgataatcaataaccctttacctaatgcctgcatcagcgcgctggatttttccgccagccaataccccaggtcatcaatcttaacgataacccctaccagaccgtagacgcccacggtcactaccagcgcgatgcctgaaagcaccagcacctgattaagcaacggcgcttcggccacaatccccagcgtgatggcgacgatttccgcagacaatataaaatcggtacgaatcgccccttttattttgtccttttcaaacttcagcggatcctgcgccgccagcttctccagacgctgctggctctgcgccggatcttctttatgtttacgcgcctccagcatatgcagcactttctctactccttcaaagcagagaaacgcgccaccaatcatcaacagaggcgtaatcgcccacgggataaacgcactgatgatcagcgccagcggcaccagaatcactttattaatcagcgatcctttcgccacgccccagaccacgggaagttcccggttggcccgcacgcctgaaacttgttgcgcattgagcgataagtcatcccctaatacaccggcggttttcttcgccgccagtttgcccatcacggagatatcgtccagtagtgtggcgatatcatcgagcaacgtcagtaaactactcccggccaaaagcattccctctcatttttattgttgaagggtgtaagtatgaagcaaaaacggcagctctgatacttgcttcacaggtcaacatttttttaacaatcaagtgcaattatatctctcgccagcagaatgattttcacgtttactatgaaccacctttttatttccaccgtgagggattatgcgtttccgccagttgttaccgctttttggcgcgctgtttgcgttgtatatcatttggggctcaacctattttgtcattcggattggcgtggaaagctggcctccgttaatgatggcgggcgttcgattcctggcagccggtattttattgctggcatttttgctactgcgcggacacaaactccccccgctacgtccgctgctcaatgccgcgctgattggcctgttattgctggctgtcggtaatggcatggtgacggttgccgaacatcaaaatgttccttccggcatcgccgccgtagtggttgcaaccgtgcccctctttaccctgtgcttcagccgcctgtttggcattaaaacgcgcaaactggaatgggtgggtattgccattgggcttgccggaatcatcatgctcaatagcggtggaaatttaagcggcaatccgtggggcgcgattctgattttaatcggctcgattagctgggcgtttggctcagtttatggctcgcgcattaccttacctgtagggatgatggcgggtgcgattgagatgctggcggcaggcgtggtgttaatgatcgcgtcgatgattgcgggtgaaaaactgacggcgctcccttccctttcaggcttccttgcggtcggctatctggcgctgtttggttcgattatcgccatcaacgcttatatgtatttaatccgtaatgtcagtccggctctcgccaccagctacgcttacgttaacccggtggtcgcggtcttgctgggtacgggactgggtggagaaacactgtcgaagattgaatggctggcgctcggcgtaattgtcttcgcggtggtactggtcacgttgggaaaatatctcttcccggcaaaacccgtagttgcgccagttattcaggacgcatcaagcgagtaaatgaatcccctgcgtgtcgatctgcgcgctggcaccttcgccgcagatccactcttccagacgctcggtaagcgcttcatccgtcagcttctcgcgcccacgtaacgcgcactcccagacaatcaatacgcgccagccgagttcctgcaagcgactgatatcgcggcgatcgcgctcaacatttttacctatcttctccagccagaactcggttcgagtcgcaggcactttaaacagatagcagtgatgatgatgccagaagcagccatgggtaaatatcacgcagcgatattcatcaacgacaaaatccggacgtccgggcagactggcgtcctgaacgcgaaatgccaggccctgcccggttaacagactggcgaggcgcttctctatcgccgtatcacgcgtggcaatcgcgcgcatatttttgctgcgagtggccttatcgtgaacgtcggccatgttgtgcctcttgctgacgcaacgccaccgcctgtttgatttttggctcaagcagttttgccaccgcggcaaagaccggcacgaccaccgagttaccgaactggcgataggcctgagtgtccgaaaccggaatacggaatttcgcttctcccggcgcttcaaaacccattaagcgcgcgcattcccgaggcgttaaccgacgtggacgatgttgctgattcagcggatcgtcaaagtctttctcacccgtggccatatcccagccgcgatcgattaaaatttccgcgccatctttgtaataacgcgcagacagcgtacgcgtgacgctttgcggattgttcggataaaccattccataaccgaagccgttaccgcgcgcctgatgttttttcgcatatcgatagaggtacttccacagcaccggcgtcaggatatatttcgcctcgaccatcgggtccaacagctgcgccagcgtcactcgctgcgcagggaaacattcgctgatatcacgcagggtaaaatcggctttcagattcagatcgcgacgaaaacccaccagcacgatgcgttcacggtgctgcggcagaaaatgtttgccgtcgatgattttcggatcgtctggcccattatcttctgcatcagccacgtcatagcccagttcgtccagcgtctgcatgatgatgcggaacgttttaccctggtcgtgacttttcaggtttttgacgttttcgagcacaaacatcgccggacgacgcgcgtcgataatgcgtaccacatcaaaaaacagcgtgccctgggtatcgcaggcaaaaccgtgcgcccgcccgagcgagttctttttcgatacgccagccagcgaaaatggctgacaagggaaaccggccagtaaaacatcgtgttcaggaatgtgttgacgaatatgttccgccgccgcctcatcactcacgccttctttatggctgagggtgatgtcgcggatatcttcattaaaatgatgcgtcgccggatcgcaataatggttggctttataagtgcgtaccgcatgtttgttccattcgctggtaaacacgcactgtccgccaatcgattcaaaaccgcgacggatgccgccaattccggcgaatagatcgataaagcgaaacgcataatgcggatgatgtgccggtggtttgggtaataacgtttgcagatgggcgaactctttctcacttaaacggtgccatgccgagtcattcgccagcgcacgttttaaaattgccgcgctccagtgattctcacctacaccattaagctgcgccaccaacgttttaacatcataaatttgcagcagtttctccagcattgcctgtgcggcattcccggtgctgtatgaatcggttactgatatattttcctgcatagatttcaccggccatctgagatggccgacaggttaacataattacagccatttagggccacgcgctcagccagcggatgaaaacgcatctatcaccttgtgatcaacaccttcattctcccccgccagttcggcactgagcttcgccataaactcgactaaaaaatgcgcgttgtgctgcgccagctgcttgcctcttgcggtttgcatggtttgcggtagcttcagcaacttagtctggaaatgatccagcgcgtagcgtttatcatcaagcgggcgatgctgtgcgaacggatcttcaccatcaaacagcgccacgcccaatgcccctgaaacggcaaacacgcgcgccaggccaatcgcccccagggcttccagccgatccgcatcctggacaattttagcttccgttgttaagggggcgatttgcgcgctgaaactgtgagcggcaatggcatgacaaacggcctcgattttctccgccggaaattgctcgaactcttcacggagcaggcgacgcgtctcttctgccgccaggattgaagaacgctgcctttgcggatgatttttcgccaggctcacaatatcgtgaaaataacaggcggttaaaatcaccagcatatcgacatcgtcatctgccgccagcttctgtgccgtagcccagacgcggcgaaaatgacacacgtcatgggccgcgtcctggtgctgatgatggtttttcaaccagttttcgaactgtgcctgccagtgttgtaagtccatacgcgctccgttgccaaagagtcgccaccttagcagtttttattcatagcgtctgctacgtgcgggacgaggtcgggtgtaccaggcaatgctgcctaacaatgccccgaccagagccataaataaaaatccgaccagtgcccctaaccactttcccgcggtagagcctaaatcgctttcaaatcccgacacgggggcatcgggaatccggctcatcacccagatgtaacgcgccattgcccagacgaaatagccacaccatgtatagaaagcccacaaagccagtttgccgccagggctgcgagagagtctctcttccatctttgtcgaaccgtattccattttgagataacccggaaaattcagacttagtactattatgtgataaaagtcacatttttccacattggatgagccagtcaagactcaatcattttttgaacaaatagataaattttgcgcaacggcagtgaatacaggaaaaatcgttttgagcgattttatttatctttgatatcggctttattaattcatttaatcaatatattagcactgattacaattatacctttttattattctgtgtcatgatgcttccgttattagccttttatcgtcttgtttatattttttgggccggcatgatgccggcttttttttatgccttcattaatgtgcgcctgatcacaccagccgtttggcgcaacaatcattgataccccctatgtttccgctcaactcataacatattgatatacatttataattttcatgaatatttatatttagaattcataattatgaattatattaaatagattagaaacattttgatatcttttaaatacatttgttacatgtaatccttaaaataaaatgaacttcatagaatagtatccaaatgtgcttttttttggataacggcacttattgatatattcatgaagattataatcacaagggaatacataatgaaaagaaaagttctggcaatgctggtcccggcgttattagttgctggcgcagcaaatgcggctgaagtctataataaagatggtaataaactggatttgtacggaaaagtagtgggtctgcactacttctctgatgattctggcagcgatggcgacatgtcatatgcccgtatcggtttcaaaggtgaaactcagatcgctgatcaattcactggttatggtcagtgggaatttaacattggcgcaaacggtcctgaaagcgacaagggtaataccgcaacgcgtctggcatttgcaggtttaggctttggtcagaatggtactttcgactatggtcgtaactacggtgtcgtatatgacgtagaagcatggaccgatatgctgccagaatttggtggcgatacctatgctggcgctgacaacttcatgaacggtcgtgctaatggtgttgcaacctaccgtaacaatggcttctttggttaggtcgatggcttgaactttgctttgcaatatcagggtaataatgaaagtggtggaccattcgggcaggaaggttccggtagtggtgatggccgtagcctttccaaagaaaatggtgatggtttcggtatgtcaacatcctacgacttcgacttcggtttaagtctgggtgctgcatatcaaactctgatcgttcagatcgtcaggttggagttggtttaaatgatcgtaaccatagcaacagaaatgctggtggtgaaaccgctgaagcatggactgttggtgcaaaatatgatgctaataatgtgtatttagcagctatgtacgctgaaactcgcaatatgaccccatatggtggtggcgagtttgataatggtgaatcaagatcagccatcgctaacaaaacccaaaactttgaagttgttgctcagtatcagttcgactttggcctgcgcccgtccatcgcttacctgcaatctaaaggtaaggatttaggcggttgggctcatgacggcaacggcgacccacgttacaccaataaagatctggttaaatacgttgatattggtgcgacctactacttcaacaaaaacatgtccacctatgttgattacaaaatcaacctgctggacaacgacgatgacttctacgaagcaaacggcatcgctaccgatgatatcgttgctgtgggcttagtctaccagttctaatcagtcaactcgctgcggcgtgttactgtaaaactgaacactagcctgagttcgtccctcatcgaactcaggcttttttattggcatttcatctccatctgcggcacacgcaattgccgaagcatatcgatacagcaccttaccctgcccctcctggcacaataacatcaaccagctactcttcaagctaacacccaaatgcatttctttatgaattaatccgtaacaaacacgcttcccatatagaaatatttgcaaaaatagtgcatgaaataagctttttctctaccaatccgggatataaatattcatcagcaccacaatattccacagcactaaatctctccccgccaccccgtacctctgataatggtctaaaatcattgaagccacttgcgacgacgttgctcaataaggaaaatttggcgtgaataatattcaacaccagtgcagcatcatcattacatacttacagccgccgactaccgctttcgatatattgactcaattttccagcctggttaaaaatagcgaccagctcagtcgcaaatatagtgactaccctaactaagcaacaataaggaatacactatgactgttcaaacaagtaaaaatccgcaggtcgatattgctgaagataatgcattcttcccttcagaatattcgcttagccaatataccagtcctgtctctgatcttgatggcgtggactatccaaaaccttatcgcggtaaacataaaattctggtgatcgccgcggacgaacgttatttgccgaccgataacggaaaactgttctcgaccggtaaccatccgattgaaacgttgctgccgttgtatcatctccatgctgcaggtttcgaattcgaagtggcgaccatttccggtctgatgaccaagtttgaatactgggctatgccgcacaaagatgaaaaagtaatgccattctttgagcagcataaatcgttgttccgcaatccgaagaaactcgcggatgttgttgccagcctcaacgctgatagcgaatatgcagcaatctttgttcctggtggtcatggcgcacttattggtttacctgaaagccaggacgtggctgccgctttacagtgggcaatcaaaaatgaccgttttgttatctccctttgccacggcccggcggcttttctggcgcttcgccacggcgataacccactgaatggttattccatttgcgcattcccagacgccgcagacaaacaaacgccagagattggctatatgccgggtcatctcacctggtacttcggcgaagaactgaagaaaatgggcatgaatatcattaatgacgacatcaccgggcgagtacataaggaccgtaaacttctcaccggcgacagtccttttgcagcgaatgcgttgggtaaactggcggcgcaggaaatgctggcagcttacgcgggttaatccctgttacgtttgaatgtaagcgcataatcaatcgcggccgcgttagtactcacgacgtggctgcgttttttcacggttaatttatggcgtactgaagccctatgttaatttctttgcggtaacgtaatccggaacacattatgcttattgagatagtgatacgtagcacttcccccatgcaattcggcaatcgctttgactaaagaaaggcctagtccctgacctacggaatgacgcgaattatctccccgccaaaatctacggaagagtttttcaggctcattaattttcgttccagggctggcgatatcaatattaagatagctgttggtatcaagaaaactggttatatgaatacgcgatttttctggcgaatatctaatggcattaacaataagattcgataacattcgttgtagtaaaattttatccgcaaagatttgctgattgcactcgaccttaaagcaaatctctttctcgtctgaaaggtattcaagatagtccaacaaattttcgacttccttattgagagaaagcgagtccagtttcaccaaaacattgtttttatctgccctggcaagaaacagtatgttctctgttaaccgcgaaatattttccagctcttcaatgtttccggcaattgttttttgatattcagcgatacttctggtttgactgagcgtaacctgattctgacccagtaatgcattaattggcgttctaagttcatgagcgagatcgtcagcaaactgacttagacgctcaaaatctttgactaaagcatgatgcattttattcaacgcctgcccaagaggttttagttctctcggtaatgcgctaacctcaacaggctctcggctatcgttataattcagcgcttccgttacaccactcaactttttgatctctcgtaatcccgttctgattaacagcggacttaatactgagcaaagtacaatggcgacaatgcaaattataatgctattaattttatactgttcaagcatgttatgtctggctgaagccaatttagccacagtaaccgttaatgatggcgaaacttcatcaatattaattcgtaaagcatctatctctgtatcattaataatgcttctgtaaatgccagctgcgctgattgtctcactagcaggtatgttatttaacatgccatcactgacatttgtccggttaacaattttattgatgctatcaccatgaataatcaagatatcctgactaacatccatcatccggttaaagtacacaggtaacgtatctggatttaccccatcaattaacaactgcttgatctgcgctgtccggttaatgagtgttgtatcatcgcgccatttcaactcacttgccaggccattatagagagtccagacaattccggcgccagcaacagacagtagcaatataaaaagcaaggttaaacggacggttatagatagtcttttcattatttttttaccgctacgaatgaatagcccatcccccggattgtggcaattagcttttcaggaaaaggatcatcaacttttgcgcggagcctgcgaatggcgacgtccaccgtattggtatcactatcaaagttgattccccaaatttcactcgcaataaccgttctgggtataatttcgccagctctggaggccagtagccaaagtaactgaaactccttgcgcgtcagtgtaatactgatattgtccctgctcacactatgactaacagagtccattcttaagccgctgatttctaatgttgaattcaaagcgtgatgttgccttaattgtgcccgaacccttgccagcaactcagaaaatgaaaaaggttttaccagataatcatttgccccactgtccagccctctgactctgtcatcgacagaatcccttgcagtaaggcaaataacaggggtttgctttgctgttcttaacgtttgtaagatctgccagccatccatacccggaagcataatatccagaatgatcaatgcataatcatccttcagcgcaagataaagcccatctctgccatcagaaacggcatcgatgacataacccgcttcggaaagcccctgcgttacccattcctgggtcctttgattatcttcaataagtagaatcttcatgaaaataatatgccataaatcatatgttatagaaacagcctggttcattacaaaattgtaatgctgctgtaaggttaccctggacgctttttcgctatcctcaaaactcattcacatgacaaggatataaacatgttaaagcgttatttagtactctcggtagcaacggcagcattttcattaccttctttggttaatgccgcacaacaaaacattcttagcgtgcacattttgaaccagcaaacaggaaaacccgctgctgacgtgacagtcactcttgaaaagaaggcggataacggctggttacaacttaataccgccaaaacagataaggatggacgaattaaggcactgtggcccgagcaaactgcaactacgggcgattaccgtgtcgtatttaaaaccggggactatttcaagaaacaaaatcttgaaagtttcttccctgagatccccgttgaatttcatattaataaagtgaacgagcattatcatgtgcctttattacttagccaatatgggtattcaacctatcgtggcagttaatgcataaatatgtaaaagcagatctctgctactgttagggaggacactccctgacagattaacagtaaacggctcttgctggctaacgacaaaaaagtgtgatggcttatgaaaaagaatcaatttttaaaagaatcagatgttacggccgagtcggtattctttatgaagcgtcggcaggtgttaaaagcactgggcatcagtgcaactgcactttctttgcctcacgctgcgcatgccgatctgcttagctggtttaaagggaacgatcgcccgcccgcccccgccggaaaagcgctggagttcagcaagcctgccgcctggcaaaataacctgccactgacgccagcagataaagtttccggttataataacttctatgaattcgggctggataaagccgatcccgccgctaatgctggtagcctgaaaaccgatccatggacactgaaaatcagcggcgaagtggcaaaaccattgaccctcgatcatgatgacttaacccgtcgcttcccgctggaagagcgtatttatcgtatgcgctgcgtggaagcgtggtcgatggtggtgccgtggattggttttccgctgcacaaattgctggcgcttgccgaacctaccagcaatgcgaagtatgtcgctttcgaaacaatttatgcaccggaacagatgccaggccagcaggaccgctttatcggcggtgggctgaaatatccttatgtcgaaggattgcgtctcgacgaagcaatgcatccgctcacactgatgaccgtaggtgtttatggcaaggcgttaccgccacaaaatggcgcgccggtgcgactgattgtgccgtggaaatatggctttaaagggattaaatcgatagtcagtattaagctgacccgcgagcgtccgccaaccacctggaatctggcagcgcctgacgaatacggtttttacgccaacgttaatccgtatgttgatcacccgcgctggtcacaggctaccgaacgatttattggttcaggcggcatcctcgatgtacagcgccagccaacgctactgtttaatggttacgccgcccaggtggcatcgctgtatcgtggcctggatttgcgggagaatttctaaatgcgtctgacagcaaaacaggtgacatggctgaaagtttgcctgcatcttgccggattgttgccgtttctctggctggtctgggcgatcaatcacggtggactgggtgccgatccggtgaaagatattcagcattttactggtcgcactgcactgaaatttttgctggcgaccttgttaatcacccctctggcacgctacgcaaaacagccgttattgatacgcactcgccgcctgttaggattatggtgctttgcctgggcgacactgcatttaacaagttacgcattgctggagctgggcgtgaataatctggcgttattaggtaaggagttaattacccggccttatttaacgttaggtattatcagctgggtaattttgcttgctttagcgttcacttcaacccaggcgatgcagcgaaaactcggcaagcactggcaacagttgcataatttcgtctatcttgtcgcgattctggccccaatacattatctgtggtccgtgaagattatttcaccgcagccgctcatctacgctgggctggctgtactgcttttagccttacggtataagaagttgcgttccctttttaaccggttacgcaagcaggttcacaacaaattatctgtataacttcatattgccgacaaagtacgcgttatccctgccggatgtggcgcgagcgccctatccggcatacacagatcgcatcaggttatgtttcgtttgtcatcaacctcaaatcaccaaaataatttattttatttcaataagatagataagtagaactgagaaagccatgctctcgtttcctaagagttgttgcattttgctatatgttacaatataacattacacatcatatacattaactctggaggaaactgttttggcgattcgtctttacaaactggctgttgctttaggtgtctttattgttagcgctcctgccttttcgcatggtcatcactcacacggcaaacccttaacagaggtcgaacaaaaagctgctaatggtgtttttgatgatgccaatgtacaaaaccgaacgctcagtgactgggatggagtctggcaatccgtttatcctttactgcaaagtggcaaacttgaccccgtctttcagaagaaagcggatgcagataaaactaaaacatttgctgaaattaaagattattatcacaaaggttatgcaacagatatcgagatgattggcattgaggacggcattgttgaattccatagaaataatgaaacaacatcgtgtaaatatgattacgatggatacaaaatactcacctataaatcaggcaagaaaggcgttcgttacttattcgaatgtaaagatcctgaaagcaaagcccctaaatatatacaatttagcgatcatataattgcaccacgaaaatcatctcattttcacatttttatgggtaatgattcacagcaatctttattaaatgaaatggaaaactggccaacgtattatccatatcagttgagtagcgaagaagtggtcgaggaaatgatgtctcattgagtattctcatgataacgcctcgatgccgctttagtaagttatcataactgccactggtccatccacaaacgccactgaacgcaagctagctacagacacgctcatcactatgacgtgtctgtatattaataagctaacccgcattgagttaaccaataacggattccatacacaatacggccaacagagaaagatacctgtgctcacgccattgcttatattggctggttacaatatgcactatcaattttttaaataacaaattattaaaaccacatctgtataaggaatttttaaggttcgtgggatagcttgactgtgaaaatcacaggagctacaaaaatgaaccgattctcaaaaactcaaatttatttacattggataacgctgcttttcgttgcaataacctatgccgcgatggaactccgtggctggtttcctaaaggtagtagtacttatctgctgatgcgagaaacacattacaatgcgggtatattcgtttgggtgttaatgttttcacgcctgattataaaacaccgttatagtgatccttctattgtgccaccgccacctgcctggcaaatgaaagcggcttcgctaatgcacatcatgctttatataaccttccttgcacttcctctgctggggattgctttgatggcttacagtggaaaatcgtggagtttccttggtttcaatgtgtctccctttgttaccccaaacagcgaaattaaagcactgataaaaaatattcacgaaacctgggcaaatataggctactttttaatcgcagctcacgctggcgcagcactctttcatcactacattcagaaagataatactctgttacgaatgatgcctcgccgcaaataagtcgatccccttacaaggaaatgtgaaccatggacatcaacgcgtcataaatgtttacgcaagtgcacaatgcaccctttccactatcaacaaggaggagcagaaactgtgtaaatcgtacaatggtaagacttatcaaaaatacaggttaattttggtatttaaaccttttttacttgttagtatgatacaaaggctttcaaaaaagctgcgaaattcaacaactcttggaaattatggactttgtcccgcggctttaatctgacggccgcgttccttttttgactcaattattgaacccttctctacgcaacttcagttcccaccaccaactttgcggcagtttcataggatgaatgtctaaaagaataatggtgagcgataagaaaacgactgaataactgcacattttcgctcgaaagcttcctgtcagatccatagcgaatcaagtgctgaatgtcacagtatcgaacagaaaacagtgacgatctaacccttcaagaatattctacgattgttctgtttaggaaaagcaaggcgggaagtcgggagataagtcattgataaagtggcggagagagggggatttgaacccccggtagagttgcccctactccggttttcgagaccggtccgttcagccgctccggcatctctccgttcagatggttgccatgatgccaggaaatttggcattttaacagtccctgtccgtgcaattttgttcaagtgacgagtttgcgagcaaaacgatgattaagtggccctggaaagtacaagaatcagcacatcaaactgcccttccctggcaggaagcactatcgatcccccttttaacgtgtctgacggaacaggaacaaagcaaattagtcactcttgccgaacgttttttacagcaaaagcggcttgttcctttacagggctttgaactggattcattaagaagctgccggatagcacttctattttgcctacccgttctggagttaggactggaatggctggatggttttcatgaagtcttaatttatcctgcgccatttgtggtcgatgatgaatgggaagacgatatcggtctggtgcataaccaacgtattgttcagtcaggtcagagctggcagcaagggcctatcgttttgaactggttggatatacaagattcttttgatgcttctggttttaacctgattattcatgaagtcgctcataagctggacacccgtaacggcgatcgcgccagcggagttccctttattccgttgcgtgaggttgctggctgggaacacgatcttcatgctgcaatgaacaacattcaggaagaaatcgaattggttggcgagaatgcggcgagcattgatgcttatgcagccagcgatcctgctgaatgttttgccgtactttctgaatatttctttagcgccccagaactttttgctcctcgtttcccttcattgtggcaacgtttctgccaattttatcaacaagatcctttgcagagactgcatcacgctaatgatacagactcgttttcggcgacgaatgttcattaattaacaactttgcagattaattaaccaattgaaatgacttatgaaatttagtgttgacagacaaggtaccgctaagtaatattcgccccgttcacacgattcctctgtagttcagtcggtagaacggcggactgttaatccgtatgtcactggttcgagtccagtcagaggagccaaattctaaaaattcgcttttttagcgcaatgtcactgaccttagttgaacattgttttttaacggatagcgggtttttaacatcttaagcgccctcgacctttatggttgagggcgttttgctatgaacgccatcaccattttcccctcgattataaaacttgagttattcagtagtctcccctcttgcaactcacacccaaaactgcctaacgaaaagttattaattttcaatcatattgctatcagtatttacattttttcgctgtgctagaaagggcgcatttatgttagctcgttcagggaaggtaagcatggctacgaagaagagaagtggagaagaaataaatgaccgacaaatattatgcgggatgggaattaaactacgccgcttaactgcgggtatctgtctgataactcaacttgcgttccctatggctgcggcagcacaaggtgtggtaaacgccgcaacccaacaaccagttcctgcacaaattgccattgcaaatgccaatacggtgccctacacccttggagcgttggaatcggcccaaagcgttgccgaacgtttcggtatttcggtggctgagttacgcaaactcaaccagtttcgtacgtttgctcgaggttttgataatgtccgccagggtgatgaactggatgtcccggcacaagttagtgaaaaaaaattaaccccgccgccgggtaatagcagtgacaacctcgagcaacagatagccagtacttcacagcaaatcgggtctctgctcgccgaagatatgaacagcgagcaagcggcaaatatggcgcgtggatgggcctcttctcaggcttcaggcgcaatgacagactggttaagccgcttcggtaccgcaagaatcacgctgggcgtggatgaagattttagcctgaagaactcccagttcgattttctccatccgtggtatgaaacgcctgataatctctttttcagtcagcatactctccatcgtactgacgagcgtacgcagattaacaacggcttaggttggcgtcatttcactcccacatggatgtcgggcatcaacttctttttcgaccacgatcttagccgttaccactcccgcgccggcattggcgcggagtactggcgcgactatctaaaattaagcagtaacggctatttgcgactgaccaactggcgcagcgcacctgaactggacaacgattatgaagcacgcccggccaatggctgggatgtacgcgcagaaagctggctacccgcctggccgcaccttggcggtaaactggtctatgaacagtattatggcgatgaagtggccctgttcgataaagacgatcggcaaagtaatcctcatgccataaccgctggacttaactatacccccttcccgctgatgaccttcagcgcggagcaacgccagggtaaacagggcgaaaatgacacccgttttgccgtcgattttacctggcaacctggcagcgcaatgcagaaacagcttgacccgaatgaagtcgctgcacggcgtagccttgcaggcagccgttatgatctggtggatcgcaacaacaatatcgttctggaatatcgcaaaaaagaactggttcgcctgaccctgacagaccccgtgacagggaagtcaggagaagtgaaatcactggtttcgtcgctacaaaccaaatatgccctgaaaggctataacgtcgaagccaccgcactggaagctgccggtggcaaagtggtcacaacgggtaaagatattctggttaccctgccggcttaccggttcaccagtacgccagaaaccgataacacctggccgattgaagtcaccgccgaagatgtcaaaggcaatttgtcgaatcgtgaacagagcatggtggtcgttcaggcacctacgctaagccagaaagattcctcggtatcgttaagtacccaaacattgaacgcggattcccattcaaccgccacactgacttttattgcgcatgatgcagcaggtaatcctgttgtcgggctggtgctctcgacgcgtcacgaaggtgttcaggacatcaccctttctgactggaaagataatggtgacggaagctatacccagatcctgaccacaggagcgatgtctggcacgctgacgctgatgccacagctgaatggtgtggatgcggctaaagcccccgccgtggtgaatatcatttctgtttcgtcatcccgaactcactcgtcaattaagattgataaggaccgttatctctccggcaatcctatcgaggtgacggtagaactgagagatgaaaatgacaaacctgttaaggaacaaaaacagcaactgaataacgcagtcagcatcgacaacgtgaaaccaggagtcactacagactggaaagaaaccgcagatggcgtctataaggcgacctataccgcctataccaaaggcagtggacttactgcgaagctattaatgcaaaactggaatgaagatttgcataccgctggatttatcatcgacgccaacccgcagtcagcgaaaattgcgacattatctgccagcaataatggtgtgctcgccaatgagaatgcagcaaacaccgtctcggtcaatgtcgctgatgaaggaagcaacccaatcaatgatcataccgtcacgtttgcggtattaagcggatcggcaacttccttcaacaatcaaaacaccgcaaaaacggatgttaatggtctggcgacttttgatctgaaaagtagtaagcaggaagacaacacggttgaagtcacccttgaaaatggcgtgaaacaaacgttaatcgtcagttttgtcggcgactcgagtactgcgcaggttgatctgcagaagtcgaaaaatgaagtggttgctgacggcaatgacagcgtcacaatgaccgcgaccgtccgggatgcaaaaggcaacctgctcaatgacgtcatggtcactttcaatgttaattcagcagaggcgaaactgagccaaaccgaagtgaatagccacgacgggatcgccacagctacgctgaccagtttgaaaaatggtgattatagggttacggcctctgtgagctctggttcccaggctaatcaacaggtgaattttatcggtgatcaaagtactgctgccctgaccctcagtgtgccttcaggtgatatcaccgtcaccaacacagctccgcaatatatgactgcaaccttgcaggataaaaatggcaacccactaaaagataaagaaatcaccttctctgtgccaaacgacgtcgcaagtaagttctcgattagcaacggaggaaaaggcatgacggatagtaacggggttgcaatcgcctccctgaccggcacgttagcgggcacgcatatgatcatggctcgtctggctaacagcaatgtcagcgatgcacagccaatgacgtttgtggcggataaagacagagcggttgtcgttttgcaaacatcgaaagcggaaatcattgggaatggcgtggatgagacaactctgacagcaacagtgaaagatccgtcgaatcatccggtggcggggataacggtaaacttcaccatgccacaggacgttgcggcaaactttacccttgaaaataacggtattgccatcactcaggccaatggggaagcgcatgtcacgctgaaaggtaaaaaagcgggcacgcatacggttaccgcaacgctgggtaataacaataccagtgattcgcagccggtaacatttgtggcggacaaagcctcggctcaggttgtcctgcagatatcaaaagatgagatcacaggtaatggcgtcgatagcgcaacgctaactgcaacggttaaagatcagttcgacaatgaggtgaataatcttccggtaacattcagctcagcctcttcaggactcaccctgaccccgggagtaagtaataccaacgagtctggcatcgcgcaggccactctcgcaggcgttgcctttggtgagaagacggttactgcatcactggctaataatggtgccagcgacaacaaaactgtgcattttattggcgacacagcggcggcaaaaattatcgagttggcgcctgtcccagacagcataatcgccggtaccccgcagaacagctccggcagcgtcatcaccgccacagtcgttgataataatggctttccggtgaaaggtgtgactgtgaacttcaccagcaacgcagcgacagccgaaatgacgaacggcggtcaagccgtgacgaacgaacagggtaaggctaccgtcacttataccaatacccgctcctcgatagaatcaggagcgagaccggataccgttgaggccagtctggaaaatggtagctccacgcttagcacatcaattaatgtcaacgctgatgcgtctacggcacatctcaccttgctacaggcactttttgatacagtctccgcaggcgagacaaccagtctgtatattgaggtgaaggataattacggcaacggtgtcccccagcaggaggtaaccctcagcgtttcaccaagtgaaggcgtgacccccagtaataacgctatatatactaccaaccacgacggcaatttttacgcaagctttaccgctacaaaagccggggtttatcaattgacggcaaccctcgaaaatggcgattcgatgcaacaaacagtgacctatgtgccgaacgtcgcgaatgctgaaatcacgctggcagcctcgaaggatccggtgattgccgacaataacgatctcacgacactaacagcaacagtcgctgatacagagggcaatgcgatagccaacactgaggtaacatttactctgccggaagatgtgaaggcgaacttcacgctgagcgatggcggtaaagtgattactgatgctgaaggcaaagcgaaagtcacgctgaaaggtacaaaagcaggcgctcatactgttacagcatcgatgactggcggtaagagtgagcagttggtggtgaactttattgcggatacgctcactgcgcaggttaatcttaacgttaccgaggacaattttatcgctaataacgtcgggatgaccaggctgcaggcaacagtgactgatggaaacggcaacccgttagccaatgaggcggtgacattcacgctaccggcagatgtgagcgcaagctttactctcggacaaggcggttccgccattactgatatcaacggcaaggctgaagttacactgagcggtacaaaatccggcacctaccccgtgacagttagcgtgaacaattatggtgtcagtgatacgaaacaggtgactttgattgccgatgctggtaccgcaaaactagcctccttaacctctgtatactcattcgtcgtcagcacgaccgagggcgcaaccatgacggcaagcgtcactgacgctaacggcaacccggtagaaggcataaaagttaatttccgcggaacctccgtcacgctaagcagcaccagcgttgaaacggatgatcggggtttcgctgaaattcttgtgacaagcaccgaggtcggactgaaaacagtttcagcctctctggcagataaacctactgaagtcatctcgcgattactgaatgccagtgcagatgttaattctgcgacgattaccagtctggagataccggaaggtcaggtaatggtcgcacaagacgtagcagttaaagctcacgttaacgaccagtttggcaacccggttgcgcatcaacccgtgacattcagtgcagagccatcctcgcaaatgatcatcagccagaatacggtctctactaatacgcagggtgtagccgaggtcaccatgacgcccgaaagaaacggttcgtatatggtgaaagcatccctgccgaatggagcctcacttgagaaacaactggaggctattgatgaaaaactgacactcacggcgtccagtccgcttatcggtgtctatgcccctacaggcgctactctgacggcaacgctaacctctgcaaatggcactccagtggagggtcaggtcatcaactttagcgtaacgccagaaggggcgacgttaagtggcggaaaagtgagaactaactcttcaggtcaggctccagtcgttttgaccagcaataaagtcggtacatatacggtgactgcatctttccataacggcgtaacaatacagacacagacaaccgtgaaagtcactggcaactcaagcaccgcccatgttgctagctttatcgctgatccatcgactatcgccgccaccaacactgatttaagtaccttaaaggcaacggttgaggatggcagtggtaacctgatcgaaggtctcactgtgtacttcgccttaaaaagcggctctgccacattaacgtcattaacagcggtgaccgatcaaaacggaatcgcgacaacaagcgtgaaaggagcgatgacaggtagcgtcacggtaagcgcagtcacgaccgctggtggaatgcaaacagtagatataacgctggtggctggcccggcagacacctcgcagtccgtccttaagagcaatcggtcatcactgaaaggggactataccgatagtgctgaattacgtcttgttctgcacgatatatcaggcaatccgatcaaagtttctgaagggatggaatttgtgcaatcaggtactaacgtgccctatataaaaattagcgcaattgattacagtctaaatatcaacggtgattacaaagccactgttacaggaggcggagagggtatcgcaacgctgatccctgtattgaatggtgttcatcaagctggtctgagtaccacaatacaattcactcgcgcagaagacaaaataatgagcggtacagtatcagtcaatggtactgacctaccgacaactacattcccttcgcaggggttcaccggggcgtattatcagttgaataatgacaactttgccccaggaaaaacggcggctgattatgagttttcaagctctgcctcctgggtcgatgttgatgctaccggtaaagtgacatttaaaaatgtcggcagcaattcggaaaggattacggcgacgccaaaatcaggaggccctagctatgtatacgaaatccgtgtgaagagttggtgggtgaacgccggcgaggctttcatgatatacagccttgctgaaaatttttgcagcagcaatggctacacgctccccagagcaaactatttaaaccactgtagttcccgaggcatcgggtcactgtacagtgaatggggagatatggggcattacacgactgacgctggttttcaatcaaatatgtattggtcatctagtcccgcaaactcaagcgaacaatacgtagtttccctggcaacaggtgatcaaagcgtatttgaaaagcttgggtttgcttatgcgacatgttataaaaacctgtgattttccgttataatttcttaaagagtgttccattcggggcactcttttttacattccctctacagaactagcccttctctcacagaaaatgaataaataaaaatgcggcaccgccagaatcgcgttcgatgtgactatgatcattttcggtgagtactgctttgatctaaaggctggttttctgtgatgattgaccagcctcagagtattgatgacaccaccgttcataacagatcggcattactatgcataagtactgtctcatattctcgccaaaacactttttaatgcctttgcgaattcatccagacttatattgtcaattttttgcccaacgacgactgactccgagacatcggccattgcgggccatcgcgttttgtaatcagcataaattgcaacaacaggggtattataggcacttgccatatgtaatattgaggtgtcaggagttattgcgatataagcatcttttatgattgctgctgaacgtttaatcgagggtggtaaggataaacggtagacattattataacaatccactaatgccctggctttatcttcacctttgggtccatgaacgatcactattggtatatctgtttcactttaaatttttgctattagattttctgcaatcgataatgaaaatgtacgttcctgcgagctaccttctaaattgaacgcaatgtaagatcctaacgatcgcatttcctcgcgcacctcatcgagtacatcctcacttagtggcaattcatatattggcctgactgctggaaaacccgcctcacgcatcataaatgcccatgtcataggtacgggagcccggagtttctgatccatactggacgcgttcttgcacaaaggggagaagcaattcatggttataccaacaacctgaaaattcgtttttgctttcaactgactgataaataacatcgttttcaggttctttttacgcatcccctcaatgcaaagatccggcgtaccgtattgctgtgttatgttctttgctaaatcttttatttcttttaatgttgcgtgatcctgcatagtcattgtgactaatgttaatttagtctgttcaagtttaagcgcattaaagacttctaaattaattgtcgacgttacaattaaaagatgcttaattttatgcaattcaagcgcccgaataacaggaaagatggccatagcatcgccaatctgatcgggaatatggatgacaacaaagtctgttttttcaatattgaaattataagctttataatcgtagtaactaaatgcaatacgtctcaacaatgatgctaaaaacatacctaacctcgcctccctactggttataatgcaatgcagtctatcagactcatcagggtgccattttgtgcatatgcggacttttatgtttcatatctctaacctgtgggtcctctgcttaatccttaaacaacaccagcaactcctgcgctttcatcttccatcgaatttttcatgttgccgctaatcagccataaaatcatttgcagatgcgctctgtcgaggtagtctcataaggttcgtttatagatcgacggcaatgtgagttaccttttccatactaattataaaaagacagtacaaacaggatcattatggactccacgctcatctccactcgtcccgatgaagggacgctttcgttaagtcgcgcccgacgagctgcgttaggcagcttcgctggtgccgtcgtcgactggtatgattttttactctatggcatcaccgccgcactggtgtttaatcgcgagtttttcccgcaagtaagcccggcgatgggaacgctcgccgcatttgctacctttggcgtcggatttcttttccgtccgctcggcggtgtcattttcggtcactttggcgaccgactgggacgtaagcgcatgttaatgctgaccgtctggatgatgggcatcgcgacagccttgattggtattcttccttcattctcgaccattgggtggtgggcacctattttgctggtgacactgcgtgccattcagggatttgcagtcggcggcgaatggggaggcgcggcgttgctttccgttgaaagtgcaccgaaaaataaaaaagccttttacagtagcggtgtacaagttggctacggtgtaggtttactgctttcaaccggactggtttcattgatcagtatgatgacgactgacgaacagtttttaagctggggctggcgcattcctttcctgtttagcatcgtactggtactgggagcattgtgggtgcgcaatggcatggaggagtccgcggaatttgaacaacagcaacattatcaagctgccgcgaaaaaacgcatcccggttatcgaagcgctgttacgacatcccggtgctttcctgaagattattgcgctacgactgtgcgaattgctgacgatgtacatcgttactgcctttgcacttaattattcaacccagaatatggggctaccgcgcgaacttttccttaatattggtttgctggtaggtggattaagctgcctgacaattccctgttttgcctggcttgccgatcgttttggtcgccgtagggtttatatcacaggtacgttaatcggaacgttgagcgcatttcctttctttatggcgcttgaagcacaatctattttctggatagttttcttctccataatgctggcaaacattgcgcatgacatggtggtgtgtgtgcaacaaccgatgtttaccgaaatgtttggtgccagttatcgctatagtggcgctggagtcggttatcaggttgccagtgtggttggcggtggatttacaccttttattgccgctgcactcatcacttactttgccgggaactggcatagcgtcgccatttatttgctggctggatgcctgatttccgcaatgaccgctttgttgatgaaagacagtcaacgcgcttgatagcctggcgaagatcatccgatcttcgccttacacttttgtttcacatttctgtgacatactatcggatgtgcggtaattgtatggaacaggagacacacatgaataataagggctccggtctgaccccagctcaggcactggataaactcgacgcgctgtatgagcaatctgtagtcgcattacgcaacgccattggcaactatattacaagtggcgaattacctgatgaaaacgcccgcaaacaaggtctttttgtctatccatcactgaccgtaacctgggacggtagcacaaccaatccccccaaaacgcgcgcatttggtcgctttacccacgcaggcagctacaccaccacgattactcgccctactctctttcgttcgtatcttaatgaacaacttacgttgctgtatcaggattatggtgcgcatatctcagtgcaaccctcgcagcatgaaatcccttatccttatgtcatcgatggctctgaattgacacttgatcgctcaatgagcgctgggttaactcgctacttcccgacaacagaactggcgcaaattggcgatgaaactgcagacggcatttatcatccaactgaattctccccgctatcgcattttgatgcgcgccgcgtcgatttttccctcgcacggttgcgccattataccggtacgccagttgaacattttcagccgttcgtcttgtttaccaactacacacgttatgtggatgaattcgttcgttggggatgcagccagatcctcgatcctgatagtccctacattgccctttcttgtgctggcgggaactggatcaccgccgaaaccgaagcgccagaagaagccatttccgaccttgcatggaaaaaacatcagatgccagcatggcatttaattaccgccgatggtcagggtattactctggtgaatattggcgtgggaccgtcaaatgctaaaaccatctgcgatcatctggcagtgctacgcccggatgtctggttgatgattggtcactgtggcggattacgtgaaagtcaggccattggcgattatgtacttgcacacgcttatttacgcgatgaccacgttcttgatgcggttctgccgcccgatattcctattccgagcattgctgaagtgcaacgtgcgctttatgacgccaccaagctggtgagcggcaggcccggtgaggaagtcaaacagcggctacgtactggtactgtggtaaccacagatgacaggaactgggaattacgttactcagcttctgcacttcgttttaacttaagccgggccgtagcaattgatatggaaagtgcaaccattgccgcgcaaggatatcgtttccgcgtgccatacgggacactactgtgtgtttcagataaaccgttgcatggcgagattaaacttcccggccaggctaaccgtttttatgaaggcgctatttccgaacatctgcaaattggcattcgggcgatcgatttgctgcgcgcagaaggcgaccgactgcattcgcgtaaattacgaacctttaatgagccgccgttccgataataagttctgaaccttcttatcagaaatagatgtgaaggagtaagtaagacacctggcaaatagcctgcaataatcgtgggctgtttgcttccttgggcggatacgagttttattatcgtcttaatgatttccacatattaaaagcaagtatgctttcaaaacacaattataaaaaatcccgccaacaatataagtttttataaaattaaatataagattatggctttagaatatttttatttctaatagacgagatttttcctgttatgatataatatgctgaattaacacatgttaacgatttaccagtaatgtaaataaattttcgaggagatcattccagtgggacgtaaatgggccaatattgttgctaaaaaaacggctaaagacggtgcaacgtctaaaatttatgcaaaattcggtgtagaaatctatgctgctgctaaacaaggtgaacccgatccagaattaaacacatctttaaaattcgttattgaacgtgcaaagcaggcacaagttccaaagcacgttattgataaagcaattgataaagccaaaggcggcggagatgaaacgttcgtgcagggacgttatgaaggctttggtcctaatggctcaatgattatcgccgagacattgacttcaaatgttaaccgtacgattgctaacgttcgcacaattttcaataaaaaaggcggcaatatcggagcggcaggttctgtcagctatatgtttgacaatacgggtgtgattgtatttaaagggacagaccctgaccatatttttgaaattttacttgaagctgaagttgatgttcgtgatgtgactgaagaagaaggtaacattgttatttatactgaacctactgaccttcataaaggaatcgcggctctaaaagcagctggaatcactgagttctcaacaacagaattagaaatgattgctcaatctgaagttgagctttccccagaagatttagaaatctttgaagggcttgttgatgcccttgaagatgacgacgatgtacaaaaagtttatcataacgtcgcaaatctctaattatcttttaaagaaatctgtctttacggcagatttctttaatctcatataattcttataaaaaatataatattcaactcgtcatattgattatacccccccgttcccagagaaataatatttattaaaattccagttcttctttttctgattacagaaggcaaagtggcaattacgcatagtttcccgataaagacgcgatagcgacatcccgcataaggcatttttctctttatctttgtacggtacttcatggaacagagtttttgaccttgcgaatcgtgatgtctgttggggagggacaatttgctcactgaagcgtgagactcgattaagcgcacgaaacacagaaatcaaaaaacccggtcacttttttacaaggtaaccgggtaaaaataatttttattttttaactgttttgagactcatagagatgtctcaaaactaaaatttggctcctctgactggactcgaaccagtgacatacggattaacagtccgccgttctaccgactgaactacagaggaatcgtgagaacgaggcgaatattagcgatgcccacccacaatgtcaaagcctgttttttaaatttgaaatcgtttgctgaaataatctgcattttgtcgtttattccgacacaactggctttttttcacacttttgcggctcgggtcgagggtatttccatagccaacgtccagtaaccattcgccagtaaaacagcacggcccgcacagcccagtcggcaaacattcccatccagacaccaaccacaccccagccaagcatgattcccagcacataaccgactacaacccgacaaccccacatgctcaacatcgaaacccacatggcgtaacgggcatcacgagcacctttaaatccagcgggtagcacccatgaggcggaccaaataggcataaataaagcatttagccaaatcagaatcacaacgacatgtttaacctgtggatcctgggtgtaaaacgatgccataaccccggcaaagggagccgttagccaggcgatggccgttaatccaagagtggaaagccagaacacatgccgcaactgaatctctgcttgcgctatctgccctacccccaaccttcggcctgtaatgatcgtagaagcagagccgagcgcacttccgggtaagttgataagagccgcaattgaaaacgcgataaaatttccggcaataacactggtccccatcccggcaacgaacatttgggttaataaccgaccactggtaaataacactgattcgacactcgcgggaataccaatccccatgacttcccagataatgctaaaattcagcggtttaaaatagctctttaacgaaatccttagcgcaggattaaaaccaatcgccagcacccacaaaattgcaactgcgccaatataacgagaaatggttaaacccagccctgccccgacaaatcccagtcccggccaggagaaaaggccgtaaatcaatatgccgctaataataatattaagaatattcaggctaccgttaatcaatagcggtattttcgtattccctgcaccacgaagtgccccgctaccaataagagtgatggcagctgctggataactgagtaccgtcagctccagataagtcaacgccagtgctttaacttctgtcgtggcatcacccgcgacgaaatcaataatttgttcgccaaaatgatgaataagcgttgccaacagtacggcaaacaacgtcatgatcaccaatgactgccgcgtcgccaccctcgctcgtcgtcgatcccgcttaccgagactaaatgccacaacgacagtagtaccaagatcgatagcagcaaaaaaagccataatgaccatattgaagctgtccgccaatcccacgccggccatcgcatcttttcccagccagctgaccagaaaagtgctcagaacccccatcaacaggacacaggcattctccatgaagataggaacagcaagcggggttatctcgcgccagaacaacactttgtagctcttgcgtttagcgtgccagcgagtgccgtgaacaacctggcgtaaagcagaggagatattcaaagccgaccttaattgcagaaagtgaaaccacatttcaaataatgagggagaatcagcaaagctgcaaagattttcgccaacaaattgtctgcaaatgcaacaaactgttgatagaaacggcaaacagttggggaatttaaaaatcgggtttgacaaaagatttttcgccgttaagatgtgcctcaacaacgattcctctgtagttcagtcggtagaacggcggactgttaatccgtatgtcactggttcgagtccagtcagaggagccaaattcctgaaaagcccgcttttatagcgggatttttgctatatctgataatcaatttcctcttcactgctttccatcacctgccgcttgatatcctcaactgacagtcctgcattacaaagttccagaaagcgccagacatagttacgctgaagttgtcctcgcttcagtcccaaccagacagtattagcatcaaaaagatgccgcgtatccaggcggattaaattctcttcctcttgttcgccactggattgctcggcaactaatccgatcccaagcccaagagcaacataggttttaatgacatcagaatcctgcgcacttaatacaatatctgccagcaaacctttgcgggcaaatgcgtcatcaatacgtgagcgccccgtaatcccctgtcggtaagtgattaacggccacttcgctattgattccagcgtcaatggtgaaatttgcgtcaagggatgatcgtgtggaacaagcaaactatggtgccaacgaaaccacgggaaggcgacgagctgcgggtcattactcaaacgctcgctggcgataccaatatcagcttcgccattttgcaacaatgtcgcaatttcctgtggcgtcccctggattagctcgagccgaacctccgggaaaagttcgcgaaaagctttaatgacctctggcaagctataacgtgcctgagtatgcgtcgttgcaatagtgagaacgccagacgtatcgttggtaaacaggtctgcaagccgacgaacattactggcttcattcagaatacgttctgcaatgaccagtaatgctttgcccggttcagtcatgcccagcagtcgcttacctcgtcgaacaaatatttcgatgccaagttcatcctccagttcccgaatatgacggctgacgcctgactgtgaggtaaaaagcatattcgcaacctctgtcaggttgtaatcctgacgtgcagcctcgcggattatctttagttgttggaaattcacggtaaactccgggcagttcagatttcccgttattgttaaagtctaatgcccggcataacaaataataaaaacccgcatcttattccatcccgatataacacttagctcaccaattgccactgccttttttccatcactggagaactaatcactgacattaacaactctttcactgcctgtgcctgtggcgataagttcgctctggcgggtaaatttaatgacaaagagagactcatggaaggagtggtaatgcgtgacatccacccatttactgcgccacataacgaacgcgcggccgattcgggtaatactgcaacgcccatgccgctggcaatcgctgcggtaagcgtggcaatagactcaatttcaccaataacttttgccgtgagtcgccgtagggaaaaagcctcatcaacacgaagtctaatagcactgtaatcactggggagaaagaggttcatttgcgcaatagcattcacatcaacgctttgccccgggcaatcttgagttcctaccagaaaaagatcttctttcagcaaagcctgactggatacaccagccacaggggaatgctcataaatcaccgccatatcgagttggtgatttatcaatttttcgttaagcactgcaccactattttcatgaagatagataacgatctccggaaattcagcgcgaaccgcctgtaataagggcatggtgatggatgacgcagcggttcctggtgcaaagccaatcgagacttgccccgataatgcctgaccaacgttatgcaccgccagttgggcctgttcacactgacgtaaaatggcccgcgcatgggtatagagaatttttccggcgtctgttggtgtaacgccccgctttgtacggatcaaaagttgttgatttaactcaccttccagtgtggcaacctgctggctgagcgctggttgtgcgatatgcaatacttcagcagcctgggtcaggctaccaatatctacaatttttacgaagtatttcaggcgtctgaagttcatgttgcctccggtttttaagaatcggcccaagtgccgccattacttacaaccagattgcaagatgcttgccagttttattttggtgttgatgtacaagctaaccaactgtcaaataagagattatgatagattcgtcatttgctcctttaatcagctgtcgcgttcccctgccctataaaaggagggtatgcaccacgatggttcattacccaataagattgaaagctcaccactttgttgaaattgacagcaaacaaacaaaaaaatgcatttcaccctttgacatcaccatgcactgccattaatatgcgccccgttcacacgattcctctgtagttcagtcggtagaacggcggactgttaatccgtatgtcactggttcgagtccagtcagaggagccaaattcaaaaaagcctgctttctagcaggctttttgctttctaattaccaacgctcttaaaacatctgtcttgaaccagaactaatttgcacaggcattcccgatcgacgttgcaacgcagcatttgcgcgatttacatcaacttcttgcccgttgataaacgcccgcaaagatggggttaccggcaatggcacttttcggtcagactcatattctgcacgattgcgcgacaatggctcatgaacttccagccagttcgagccatctggttcagtggtgtattttactggctggtcgataatttgcacacgcgtcccaacaggaacattatcaaacagatatttgatatcgtcattgcgcagacgaatacagccctgacttacccggagcccaataccaaaattggcattggtaccatggatggcatacaacctgccaatataaatcgcgtacagccccatgggattatcggggcccgcaggaacaaatgcgggcaaactctcccctcgtttcgcatattcgcgccgagtgttcggcgttggcgtccaggttggagcttcttgtttacgttcaacggtagtcacccagttacgcggggtttctcgcccagcctggccgataccaataggaaagacttccacagtattactgtctggtgggtagtaataaagacgcatctcagcgacgttaacaacaatccctttacgaacagtgtcgggcaaaatcagttgctgcggaatggtgagttgcgagccagacttcggcaaaaaaacatcagcgcccgggttcgcttccagcatgttacttaacccttgcccgtattgtgcggcaaaagtctccagcggctgggtattgtgatcaggaacagttacagtaaacgactgccccactaaacggctaccctctggaggtaatggataagttaccgccaggctagtatggctggcaaaaagcagagcaaatgagcaaagaatatttacacgacgcatcatgtccctttcctatgtcgcgaaagctatccgttaagtatagcttttatcagacttttcgtttttaactgttcaaatcagaagtcgtattccccggtagaacaatattactggcagcaagttcgcccatgttgttgtatatcgcacaggcagcttcgatgatgggcatcgccagagctgcgccactcccctcacctaaacgcatctccatattgagataaggctccagccccaaatgcgagagcgctatacgcgcgcctttttctgccgacaggtgagaaggaatgagatacggtttgatcgcaggagacatctggcaggctgcgagcgcagcagcataagaaagaaatccatccagcaacacgggtaaaccgcaggaagcagcacctaacatcactccagctattccgaccaaatcaaatccacccacttttgccaggacatcaacaccatcctgaggatttggttgattcaacgtaatcgcccgacgcacaacatcaattttattagccagtttatctgtcggcaggtttgcgccaatcccaaccacttcttcaggatcccggccagtgattgtgctgactattgctgctgccggtgtcgtgtttgccatccccagttcacctacaccaaacagcgtgacaccgttttttgccagctcctgcgtataacatatgacgtccaaaagcaacttttcagcctgacggcgactcattgccggagctgaagcaatattgccgctacctcgtgcgacacgcatgttgataagcccggggataggctcagcagtatcaataccaacatcaattacgtggacgttagcgcccgcttgttctgccagcacacacacgccggttgttccacgggtcatattttcagcctgtatggctgtcacttcttttggagaaatagcgaccccttcctcccagacgccgtgatcggcacacataaccagtaccgcttttttgcccacatgcggtatgccattcaaccccggcattcctgccagttgtatggcaagcacctccagctttcccaggctaccaacaggtttgagtaacccgtcaatatgccgttgtgcacgcgacatagcggtagaatcgatggctgggatcgtattcagtaaatcggcaagtatttgcatctcacgtctctttatagcagtgccagcaggaagaccagttcaccaagctctatggctgctcccagcgtatcgcccgtttgcccgcccagcgtacgtttgagaagctgaccgaggatgaaaatcgccaccatcgtcaccaccatagcagccacaccatgcatacccggcaataatacggcagcaaaaatagcggctaagccgagtgtgacgcaggtttgtcgcccatcaattttgccaatgaacacattgccaagcccttcttcccgcgcataacgatgacgatacatcaataatgcggcagtcccgcggctgaccgcacatgctgccgccagcgatgcaaggatcgattcgccacgcagagccaactcgcttaacaccagaatctttgccagtaccacaaaaatcaatgccagaccgccgtgggtgcctaaacggctatcacgcatgatttccaacatgcgatcgcggctacgtgcagaaaatacgccatcacaggtatcagcgaggccgtccagatggaatcccccggtcatcagcaccagcacaagtacgctaaacagtgccgccagtggtgcgccacaccatgcctgcagcaccatgaagaccagcccgctaatcgcgccaagcaataatccaatcaaaggaaaagtaataataccgcgagaataatgctcgaaatccagtccctgggaccagcgacgcggtacaggcagacgcgtaataaatgagagcatcgcccaaaataatttactcatttgatttttactccaatacccgaaaccaccagccatacttcatttgccgcagcggccaactgctgatttacccgcccggcaatatcacgaaaatgtcgtgccagacgactctccggcacaatccccattcccacttcgttagtcactaatacaacctttgcggggcaacgttggcaggcagcaatcaacgactgaatctcagcattaatcgcctgttccatcgcctgataatcccattcatcagggtctttatcgccgccataatcaaacaacagattagtcaccattgtggtaacgcattcaagcaacacaacctcattcgggttaatgtctgcatgaattaattcatcaagatgttgccagcgctccactgtgcgccagtgctccgggcggccttgccgatgatgttctatccgtgcagccatctcatcatcaaggatttgcgaggtagcgatatacagaacctgtgaagagtccccaataagcgcctctgcgtggcgactcttcccgctccgtgcgccccccgtcaccaaaatcatcataccgactcctgattcaaatgtatgatggtattcattgaacagaacaatggatcccccaccgttgctgaccgcaaaacatttacgcgattaatactgcgcgtaatataattaaaaatccagcattctcaatccattacgaaataagatggcattacggaatagccagactttctcgtgttaacgtccgacaaaatgcgtcattgacagcggtttctgtggattgacacatttcattcagataatgaattaatgctactgccggaacaaccagcaaacgggcattgtgttctgaaatccaggctattgattcaacgtcagcgacagatctgcgctgtaaaagaacttgtaaaacaacgtaatagaattatccggaatggtggcgactatgcactagggaaggtgcgaataagtggggaaattcttctcggctgactcagtcatttcatttcttcatgtttgagccgattttttctcccgtaaatgccttgaatcagcctatttagaccgtttcttcgccatttaaggcgttatccccagtttttagtgagatctctcccactgacgtatcatttggtccgcccgaaacaggttggccagcgtgaataacatcgccagttggttatcgtttttcagcaaccccttgtatctggctttcacgaagccgaactgtcgcttgatgatgcgaaatgggtgctccaccttggcccggatgctggctttcatgtattcgatgttgatggccgttttgttcttgcgtggatgctgtttcaaggttcttaccttgccggggcgctcggcgatcagccagtccacatccacctcggccagctcctcgcgctgtggcgccccttggtagccggcatcggctgagacaaattgctcctctccatgcagcagattacccagctgattgaggtcatgctcgttggccgcggtggtgactaggctgtgggtcaggccgctcttggcatcgacaccaatgtgggccttcatgccaaagtgccactgattgcctttcttggtctgatgcatctccggatcgcgttgctgctctttgttcttggtcgagctgggtgcctcaatgatggtggcatcgaccaaggtgccttgagtcatcatgacgcctgcttcggccagccagcgattgatggtcttgaacaattggcgggccagttgatgctgctccagcaggtggcggaaattcatgatggtggtgcggtccggcaaggcgctatccagggataaccgggcaaacagacgcatggaggcgatttcgtacagagcatcttccatcgcgccatcgctcaggttgtaccaatgctgcatgcagtgaatgcgtagcatggtttccagcggataaggtcgccggccattaccagccttggggtaaaacggctcgatgacttccaccatgttttgccatggcagaatctgctccatgcgggacaagaaaatctcttttctggtctgacggcgcttactgctgaattcactgtcggcgaaggtaagttgatgactcatgatgaaccctgttccatggctccagatgacaaacatgatctcatatcagggacttgttcgcaccttccctagaacaccacaatttcgctctctcggtaaggcactgtcacagcattcaacagaatgtgacttgccagatttattagcgccaccagatgtttaaccgggtaaccacgacccagtcggggatatattccatcttctcgctgacatcatcaagaataaaaaggtttatcacactcagagcaacgttcttcagcaggcgggataattcttcaacatttagaagatgtgttattaaaggcatacaaactggacgtattgtattttcttttggtggttgacctaaggtagcagtttatcctgatgcgctgagatttctgtaatatctacgtcaacattctcctcgaatagaaaatgcagccccggcaagtgattcacattttttaacaaaacgttgttagcgtgccattttcagaagctctccaagaaagcgaattcttttctcaaattctgcattctcagacacagctttctactccatggtaatggcccaaatacgaagttgctcaggatcattagtggtgctgagaagttaaataaccatgcggagtaccactcgtcatcacgtatttatatatcatgaagctattgttgtgttttgtacatcagtagatatattctgatatactccttttgctagacataacctttcacctgcttgcaaagcttctgtgttctgacattgccaaattgttgcaattctgtatccagccttctttcagtcatagcttcgggccgcgataagactcactgatctgaccctgattcctcttgcagactttatagaccaattaaaatgcagtttctgcaggtcaacgtctgaccatcattgtcatcactctggccattagagtaaccttctgcattcatccttttgtaaaaagtttatattagtatcagcaattaaccggacctgatactgatatgagtcttaccgcatatacggtcaatttcagcaattaattacattatccacgccaaagtatttgtcatcacaatgatggtaccttctttcagacaccattttttcaactccgttttccacggaccgcactcttatgtcaagagtgcggtccgtggatacaaccagagaccgactgacacgagtcagaggaaacgacggatatgttcagtcgtaaaatatctatcaaaaaacatgattaaggtcaaaaatgtttgatatttacaatttatgaagatgacaataattatagatatatgagaacataaatgaaaataattatcattacagtaatcatttgtactttgtattaatgagggatgaaatgttatataatataccttgtcgaatttatatcctttccactctgtcattatgcatttctgggatagtttctactgcaaccgcaacttcttcagaaacaaaaatcagcaacgaagagacgctcgtcgtgaccacgaatcgttcggcaagcaacctttgggaaagcccggcgactatacaggttattgaccaacaaacattgcagaactccaccaatgcctccatagccgataatttgcaggacatccccggagtagagataacagacaactccttggcaggccgtaaacaaatccgcattcgtggctggatttgcccctatatttccagacatctgttatcacttaacccattacaagcccgctgccgcagatattcccgtggcgagcgataacccagcgcactatgcggatgccattcgttataatgctcgaacgcctctgcaaggttctttgctgccgttaacccgtctggtttgggcatgatactgatgtagtcacgctttatcgttttcacgaagctctctgctattccgttactctccggactccgcaccgccgtgttcttcggttcaagtcccaacatccgggcgaactggcgtgtttcattagcccggtagcatgaaccattatccgtcagccactccactggagacgacggaagatcgttgccgaagcggcgttccaccgctcccagcatgacgtcctgtactgtttcactgttgaagccgccggtagtgaccgcccagtgcagtgcctcacgatcacagcagtccagcgcgaacgtgacacgcagtctctctccgttatcacagcagaactcgaacccgtcagagcaccatcgctgattgctttctttcacggccactctgcctgtatgtgcccgtttcgatggcggtacagcaggttttcgctcaagcaacagcgcattctggcgcatgatccggtaaacacgtttggcattgatcgcaggcataccatcaagttctgcctgtctgcgaagcagcgcccatacccgacgataaccatacgttggcagctctccgataacatggtgtatacggagaagcacatccgtatcatcagtgtgacgactgcggcggccatccatccagtcatcggttcgtctgagaatgacgtgcaactgcgcacgcgacacccggagacaacggctgactaagcttactccccatccccgggcaataagggcgcgtgcgctatccacttttttgcccgtccatattcaacggcttctttgaggagttcattttccatcgttttcttgccgagcaggcgctggagttctttaatctgcttcatggcggcagcaagttcagaggcaggaacaacctgttctccggcggcgacagcagtaagacttccttcctggtattgcttacgccagagaaataactggctggctgctacaccatgttgccgggcaacgagggagaccgtcatccccggttcaaagctctgctgaacaattgcgatcttttcctgtgtggtacgccgtctgcgtttctccggccctaagacatcaatcatctgttctccaatgactagtctaaaaactagtattaagactatcacttatttaagtgatattggttgtctggagattcagggggccagtctagtggcgaagcatcctcccgtgttttaattctcattgatggtcaggaggtaacttatcagcgcgccggagataattatggtgtgggactgttgatagatgagtctgcgctggagcgtgttgaggtagtgaaaggtccatattccgtactgtacggttcacaggcaattggcggtattgttaacttcatcaccaaaaagggtgaatctccggactccctatatcacttaaattgatacaactttttagagtagtcattagtgaacagataattgataactcagaaccagtaaaatgcaaaagacgcaccacgctgggaaaatcgctgctattcagcagagttttgtatcgagaatggtggccagccacttattgctctcgcgtaagcgggtaccgtgacattctgcctgaacttgacctggtactgtggctgattaaagccgatgaccgtgccctgtctgtggatgagtatttctggcgacacatcctgcagtgcggacatcagcaggtgctgtttgtggtgacgcaggccgacaaaacggagccctgccatgaatgggatatggccggtattcagccttctcctgcacaggcacagaatattcgcgaaaaaacggaggcggtattccgtctgttccggcccgtacatccggttgtggccgtatcggcccgcaccggctgggaactggatacgctggtcagtgcgctcatgacagcgcttcccgaccatgccgccagtcccctgatgacccgactgcaggacgagctgcgcacggaatctgtccggtctcaggcccgtgaacagtttaccggtgcggtggaccggatatttgacacggcggagagcgtctgtattgcctctgttgcacgcacggttctgcgtgccgtccgtgacacggtggtctctgttgcccgtgcggtatggaactggattttcttctgaacctgtcgtgactgatgccctccctgactctgagtctgctcacaaaagcactgttttcgttactgtctctcttgtccgtgcaatagctcaataatagaataaaacgatcaatatctattttatcgatcgtttatatcgatcgataagctaataataacctttgtcagtaacatgcacagatacgtacagaaagacattcagggaacaacagaaccacaattcagaaactcccacagccggacctccggcactgtaaccctttacctgccggtatccacgtttgtgggtaccggcttttttattcaccctcaatctaaggaaaagctgatgaaacgacatctgaatacctgctacaggctggtatggaatcacatgacgggcgctttcgtggttgcctccgaactggcccgcgcacggggtaaacgtggcggtgtggcggttgcactgtctcttgccgcagtcacgtcactcccggtgctggctgctgacatcgttgtgcacccgggagaaaccgtgaacggcggaacactggcaaatcatgacaaccagattgtcttcggtacgaccaacggaatgaccatcagtaccgggctggagtatgggccggataacgaggccaataccggcgggcaatgggtacaggatggcggaacagccaacaaaacgactgtcaccagtggtggtcttcagagagtgaaccccggtggaagtgtctcagacacggttatcagtgccggaggcggacagagccttcagggacgggctgtgaacaccacgctgaatggtggcgaacagtggatgcatgagggggcgatagccacaggaaccgtcattaatgataagggctggcaggtcgtcaagcccggtacagtggcaacggataccgttgttaataccggggcggaagggggaccggatgcagaaaacggtgataccgggcagtttgttcgcggggatgccgtacgcacaaccatcaataaaaacggtcgccagattgtgagagctgaaggaacggcaaataccactgtggtttatgccggcggcgaccagactgtacatggtcacgcactggataccacgctgaatgggggataccagtatgtgcacaacggcggtacagcgtctgacactgttgtgaacagtgacggctggcagattgtcaaaaacgggggtgtggccgggaataccaccgttaatcagaagggcagactgcaggtggacgccggtggtacagccacgaatgtcaccctgaagcagggcggcgcactggttaccagtacggctgcaaccgttaccggcataaaccgcctgggagcattctctgttgtggagggtaaagctgataatgtcgtactggaaaatggcggacgcctggatgtgctgaccggacacacagccactaatacccgcgtggatgatggcggaacgctggatgtccgcaacggtggcaccgccaccaccgtatccatgggaaatggcggtgtactgctggccgattccggtgccgctgtcagtggtacccggagcgacggaaaggcattcagtatcggaggcggtcaggcggatgccctgatgctggaaaaaggcagttcattcacgctgaacgccggtgatacggccacggataccacggtaaatggcggactgttcaccgccaggggcggcacactggcgggcaccaccacgctgaataacggcgccatacttaccctttccgggaagacggtgaacaacgataccctgaccatccgtgaaggcgatgcactcctgcagggaggctctctcaccggtaacggcagcgtggaaaaatcaggaagtggcacactcactgtcagcaacaccacactcacccagaaagccgtcaacctgaatgaaggcacgctgacgctgaacgacagtaccgtcaccacggatgtcattgctcagcgcggtacagccctgaagctgaccggcagcactgtgctgaacggtgccattgaccccacgaatgtcactctcgcctccggtgccacctggaatatccccgataacgccacggtgcagtcggtggtggatgacctcagccatgccggacagattcatttcacctccacccgcacagggaagttcgtaccggcaaccctgaaagtgaaaaacctgaacggacagaatggcaccatcagcctgcgtgtacgcccggatatggcacagaacaatgctgacagactggtcattgacggcggcagggcaaccggaaaaaccatcctgaacctggtgaacgccggcaacagtgcgtcggggctggcgaccagcggtaagggtattcaggtggtggaagccattaacggtgccaccacggaggaaggggcctttgtccaggggaacaggctgcaggccggtgcctttaactactccctcaaccgggacagtgatgagagctggtatctgcgcagtgaaaatgcttatcgtgcagaagtccccctgtatgcctccatgctgacacaggcaatggactatgaccggattgtggcaggctcccgcagccatcagaccggtgtaaatggtgaaaacaacagcgtccgtctcagcattcagggcggtcatctcggtcacgataacaatggcggtattgcccgtggggccacgccggaaagcagcggcagctatggattcgtccgtctggagggtgacctgatgagaacagaggttgccggtatgtctgtgaccgcgggggtatatggtgctgctggccattcttccgttgatgttaaggatgatgacggctcccgtgccggcacggtccgggatgatgccggcagcctgggcggatacctgaatctggtacacacgtcctccggcctgtgggctgacattgtggcacagggaacccgccacagcatgaaagcgtcatcggacaataacgacttccgcgcccggggctggggctggctgggctcactggaaaccggtctgcccttcagtatcactgacaacctgatgctggagccacaactgcagtatacctggcagggactttccctggatgacggtaaggacaacgccggttatgtgaagttcgggcatggcagtgcacaacatgtgcgtgccggtttccgtctgggcagccacaacgatatgacctttggcgaaggcacctcatcccgtgcccccctgcgtgacagtgcaaaacacagtgtgagtgaattaccggtgaactggtgggtacagccttctgttatccgcaccttcagctcccggggagatatgcgtgtggggacttccactgcaggcagcgggatgacgttctctccctcacagaatggcacatcactggacctgcaggccggactggaagcccgtgtccgggaaaatatcaccctgggcgttcaggccggttatgcccacagcgtcagcggcagcagcgctgaagggtataacggtcaggccacactgaatgtgaccttctgacagaaccatcgcctctctgtggtcccggtcatcatgaccgggacccggaccggcgcaacggatcttcaacgccacattcgctggcattaacaataacatgatattcatcacggagtgactatgttacagatagtcggcgcgctgatcctgctgatcgcaggatttgccattcttcgccttttgttcagagcattaatcagcacggcttctgcgctggcagggctcatattgctgtgtctgttcggcccggccttactggctggctatatcaccgaacgcataacccggttgttccatattcgctggctggcaggcgtatttctgacgattgccggaatgatcatcagcttcatgtggggacttgatggtaaacatatcgcgctggaggctcacacctttgactctgtgaaatttattctgaccaccgctctcgccggtggtctgctggctgttcccctgcagatcaaaaacattcagcagaacgggatcacaccagaagatatcagcaaggaaattaacgggtattactgctgtttttatactgcctttttccttatggcgtgttctgcatgcgcaccattgatcgcgttacagtacgatatttcaccgtcactgatgtggtggggcgggttgttgtactggctggctgcattagtgacgctgctatgggcggccagccagatccaggcgctgaaaaaactgacctgtgccatcagccagacactggaagaacaaccggtgctcaacagtaaatcgtggctgaccagtttgcaaaacgattacagccttcctgactcactgacggagcgcatctggctgacgctcatttctcaacggatttcccggggagagctgagggaatttgaactggcagacggaaactggttactgaacaatgcctggtatgaaagaaacatggcagggtttaacgaacagttgaaagagaacctgtcattcacacctgatgaactgaaaacgctcttccggaaccgcctgaatttatcaccggaagcgaatgacgattttctcgatcgttgcctggacggcggtgactggtatcccttttcagaaggtcgccgttttgtatcattccatcacgtggatgagcttcgtatctgtgcctcctgcgggctgacagaagtacatcatgccccggaaaatcataagccggatccggaatggtactgctcctctctttgtcgcgaaacagaaacactgtgtcaggaaatttatgaacgcccttacaacagctttatttccgatgcaacggcgaatggtctgattctcatgaaactgccggaaacctggagtacaaatgagaaaatgtttgcttccggagggcagggacatgggtttgccgctgaacggggaaaccatattgtcgacagagtccgtctgaaaaacgcacggatcctcggtgataataatgccagaaatggagcagacagactggtcagcggaacagaaatccagacgaaatattgttcaactgcagcccgtagcgtcggtgcggcattcgacggacaaaacggacagtatcgttacatgggaaataatggccccatgcaactggaagtcccccgtgatcagtatgccggcgctgttgaaaccatgaggaataagatccgcgaaggtaaagtagaggagagatgacgcccggcgagcgcagcctcattcaacgggccctgaaaaccctggaccgccatcttcatgaacccggcgtggccttcacctccacccgtgcagcacgggaatggctgattctgaacatggcgggactggagcgtgaagaattccgggtgctgtatctgaacaaccagaatcagctgattgccggtgaaaccctcttcaccggcaccatcaaccgcacggaagtccatccccgggaagtgattaaacgcgccctgtaccacaatgccgctgccgtggtactggcacacaatcacccgtccggtgaagtcacacccagtaaggcagaccggcttatcaccgaacgtctggtacaggcactgggcctggtggatatccgggtgccggaccatctgatagtcggtggcaaccaggttttctcctttgccgaacatggtctgctttaacccttcacaaccacatcacacctgttttcacttttatcttctgtcttcagaggtatcccattatgaaaattatcacccgtggtgaagccatgcgtattcaccaacaacatccgacatcccgtctttttccgttctgtaccggtaaataccgctggcacggcagtgctgaagcgtataccggtcgtgaagtgcaggatattcccggtgtgctggccgtgtttgctgaacgccgtaaggacagttttggtccgtatgtccggctgatgagcgtcaccctgaactgagtgggaattctgatgagcagaattatcgccactaccggaccattcttagccgattttctgtaaggattttatcgtgtcagacacactccccgggacaacacttcccgacgacaatcacgaccgcccctggtgggggctgccctgcaccgtgacgccctgtttcggggcacgtctggtgcaggagggtaaccggttgcattaccttgccgaccgcgccggtatcagaggcctgttcagcgatgcagatgcgtaccacctggaccaggcctttccgctgctgatgaaacaactggaactcatgctcaccagcggtgaactgaatccccgccatcagcataccgtcacgctgtatgcaaaagggctgacctgcaaagccgataccctcagcagttgtgattacgtttatctggctgtttatccgacgcccgaaatgaaaaattaactctccagaatagccttctgctacggcctggtgttttcaccacgccacttttccatttttatatctgcatatcaggaaaatcttcagtatgaaaacattacctgtattacccgggcaggcggccagttctcgcccgtctcctgttgaaatctggcagatactgctgtcccgactgctggaccagcactatggcctcacactgaatgacacaccttttgccgatgaacgtgtgattgagcagcatattgaggcaggcatttcactgtgtgatgcggtgaactttctcgtggaaaaatacgcgctggtgcgtaccgaccagccgggattcagcgcctgtacccgctctcagttaataaacagcatcgatatcctccgggctcgcagggcgaccggcctgatgacccgcgacaattacagaacggtaaataacattaccctgggtaagtatccggaggcgaaatgatgacactggaagccgacagcgttaacgtacaggcgctggatatggggcacattgtcgttgacattgatggtgttaatatcactgaactgattaataaggccgctgaaaacggttattcactccgcgtggtggatgaccgtgactctaccgaaacaccggcaacttatgccagccctcaccagttgctgtaagacaatgcagtgatacagggtatagtgccattaaccacagaaacagcactgttgtcctgtattaagcaggcaagagaagatgtccttaccctgcgccatctgcagcttctgcaccagaaccggtgaatctcactcaacaggcttcatttctcctgacgccagcctgaatacagctggcgttttcatttataaacagaaaggaaaaccgataataatggaatggacgccccgaccatgaagcaacggtaggatattactgataaaccttccagtggaggtgcgttatggccgttttaacgattagcattgacctgacaaaaaatgaattccaaatccacggtctgggtaggaacagaaaaatctaagctcagaaaacggattaaagtaagcgtcaacggagcaccgtattgacgcttatttattggtgagaactacgttccatggcaggagttcgtcaacacggttggagggccattccggcagtatgctcagaatatggcgcagatacgcttccggatcgataccgttcagacggcaggtgcctgcttttctggcaacaagcaggaatctcagcgctgaagcaggaattagaggtaaaaacgccctaccgggccatgaatcacccggtcattggagtagtaaccaaagcagatttagccagcatggaacaaatatctttggtgaaaagttggttacgggaagctggagcgcacaacgtgttagtaaccagtgcagttaataacaatggagttacagaactttttgccttgctgcatacagaagaaggctgttgttaatttcgattggttctcggatgagaatgatgacggtgatacacagataagaatcaatgagcaatgagggttgccgggcaaccctcattgaataaaacgggaattacttcgcttcgccgtttttcatttcgcccatagctttcagctttttggagatatcgcggcgttctttggagagctcggcatttttgatgatgtaatcgtcaacgcgatcttcatagtcacctttcatgctggcgatgatgccctggattgcttcaacgctcatccccggcttgatgtaatcgctcaggttgtccagcagcaggacgcgcttctggttgtcacggatctttttctcaacgtcctgaatttcacgttgcagtttgttcttacgacggaacagacgaacaaattccagtacgtcctggaatgaaggcttggtagtttccatttttatacccctgataatgtgagagtcggattcgtttaagcaaccgctattcgttagggccaacattactcatagctgccgcagatgacaatgcttttatcccttttcactatcataccctttatccttgctgaatcgaagcagcagcaagatgattctgaagttcaggaattatttgcgcaaggcccggcaaatcagattcgatagcaactcaagctgatgcgccgtttccatgttcagccacacataaccatagattggtgtttccacaaccttcaggtcatggtggttattgagcaactgacgcagctcttccacagcatcgttcaatttttccgtattggcaaaaaccggctgcggattaccttcgtacagcgcatgaacaaggctcagcagtatttgctgcatcatgtgctgggtatcacgaagtttttgcgcgttcaataacacgaaatggctggggcgcgtggcccagtatgcattgatttgcaactccagcatacaaaccagattgcggttaatggtctggataccttcatatatcgattttggaatacgggtttctttgctggcgggcgcaatcagtccacgcattttcacggcatcggtcaggagtttttgtagatggctttccagacgtgggcgttcgagtaagttcggtgagaatgcagattgatagacccgattatactcggtcagacttttcgccagttgaatgcgccagtggatgaacgcccgttgtggccagataccggtaaacaacattgccagtaaagagccgaggatcacatcgccgcttcgccataacgccgtatcaatttcacctgtcggggaacccacaacaattgccagcgtcaccccaatcaataaaccttgatacggtttcttgcccagcgccagccaaccgcaaaggaacatggccgccgcgcaccagactaacatcagcggtaacgagattaactccagttgcagagcgataagacctaaaatcgaacccaacaccgtaccgccaatacgctcaaaggcgcgagggacaacgttaccccagaacgagattggccccataatcaccaccatggtgaccagcggccaggtgctttccgggatagtaaacaggcggataatgagaaaagtgagcaggaatgccagcgcgacccgagtaccatgcacaatgcggtaatggcggtatacccggatttcaaacgggcttaatgacttatcggcacgcacgcagaaactccgtaatgagattaaaagcgctcataactcatctgtcggccagaaggcgcgcctctgaattatccgacggacaaaccgggaacagtgtaatttcccggcaggagcgaaaaaattgaaaggcgcatcttactcttttcgctttcaaaaaaaagagtggtcatcgcgttaacacaccgccctgagatgaattagtgatgttttggctgcaccgcaacatacatttcgatatcccagtacccatcttccgcgccattgttcaaataaacctcgaagcagggctttggtaacatttcataagcactgtcctgcaagagactattaaagaactgataccagggtttagcaaaatcatcaccgactacacgagctaccgccaccgcatactgaccacctgtaatttctgtcagaatgacgccctcactgttttcgggaagcgtaaagtaacccggcaccgtcacgacggtgtcgcagcgtaatttttcggcgggtgtttcatctggattgtcgtaatagacagcaacccactccttcggcacaatatttttgctatctacccacatcatcaactgctcaaagcctttctttaccgtctgttcccacgggccaacgagatggaaacctgcaacggtacgtttctcttcctgcttaatctcgtagttcatgacgcctccattgatactgtttttatatacagtatagttgcaaaattaaaaccacaaggaatgagtgttgattatgcgagcagactcgcactcctgccagtctgctgcaaaagaaaggtcaggccttatggtggaaataatcactcaggcgagaaaacatgctgccttccccgacagattccagggtaaccagcggccagtgcgccacctgtttatcacggtcgtaaagttcaatttcccctacccgctgatgggcgctaattggcgcggtgagttctttaccatcaagggtatatttggctttgatatgtggaatttcggctttcggtagcaccatccagaactcttgttccgttcccaggtcgatattttctttatcgccataccagatgcgttccgttccgacctttttcccacggtgcaaaatttgcaccgtagtaaagttttgttgcccccaacgcagtaattttcttgcctcttcctcacgaccttttgcactgtcagcccccattaccactgcaatgagacgacgctgcccatctacagccgaagcaatgagattaaacccggcaccagaagtatgacccgttttcaggccgtcaacattcatggttttatcccacaacaacccgttacggttttgctgggtgataccgttccaggtgagacttttctcactgtacatatgataaaactcgggctcgccgtggatgatagcacgagaaagcacagctaaatcataagccgagctatgctggccaggtgcatccagaccatgcactgtttcaaaatgcgtatccttgagatgcagcttctcggcatagttgttcatcatttcaacaaactgccgttgcccaccggcaatatagtcagccagagcaacacaagcgtcatttccggaatccacaattaaaccacggcttaaatcacgtaccgatacgcgatcgccctctttcaaaaacatcagtgaagaaccgacaaacaccggattatctttcgcccacgcatcgcgccccacggtgacaatatcgtctggcgtaatgcgatgactatcgatagcgcgatccacgacataacccgtcatcagctttgtcaggctggcgggattgcgctgttgatgctcattacccgcggtgaggatctgaccggtggtgtaatccatcaatacccaggacccggcatgaatctctggaggctgaggtgaaaaaggaatgttttccgccgcaaaaccagacgataagttaaaaacgaacaaagaagcagcaataataagacggcgtttcaacagcaaaccctcaggagtttcaaatagctgttctttttacggaaatacttatgaactggctggaataaagtgcaagaaaatgtgactaccctctcatttttatctgacatgatctgttgccactcgctgccaaattgtggcgctaaagctgattagcacggtgatatttgatactctggcagacagcagaaataacggatttaacctaatgatgaatgacggtaagcaacaatctacctttttgtttcacgattacgaaacctttggcacgcaccccgcgttagatcgccctgcacagttcgcagccattcgcaccgatagcgaattcaatgtcatcggcgaacccgaagtcttttactgcaagcccgctgatgactatttaccccagccaggagccgtattaattaccggtattaccccgcaggaagcacgggcgaaaggagaaaacgaagccgcgtttgccgcccgtattcactcgctttttaccgtaccgaagacctgtattctgggctacaacaatgtgcgtttcgacgacgaagtcacacgcaacattttttatcgtaatttctacgatccttacgcctggagctggcagcatgataactcgcgctgggatttactggatgttatgcgtgcctgttatgccctgcgcccggaaggaataaactggcctgaaaatgatgacggtctaccgagctttcgccttgagcatttaaccaaagcgaatggtattgaacatagcaacgcccacgatgcgatggctgatgtgtacgccactattgcgatggcaaagctggtaaaaacgcgtcagccacgcctgtttgattatctctttacccatcgtaataaacacaaactgatggcgttgattgatgttccgcagatgaaacccctggtgcacgtttccggaatgtttggagcatggcgcggcaataccagctgggtggcaccgctggcgtggcatcctgaaaatcgcaatgccgtaattatggtggatttggcaggagacatttcgccattactggaactggatagcgacacattgcgcgagcgtttatataccgcaaaaaccgatcttggcgataacgccgccgttccggttaagctggtgcatatcaataaatgtccggtgctggcccaggcgaatacgctacgcccggaagatgccgaccgactgggaattaatcgtcagcattgcctcgataacctgaaaattctgcgtgaaaatccgcaagtgcgcgaaaaagtggtggcgatattcgcggaagccgaaccgtttacgccttcagataacgtggatgcacagctttataacggctttttcagtgacgcagatcgtgcagcaatgaaaattgtgctggaaaccgagccgcgtaatttaccggcactggatatcacttttgttgataaacggattgaaaagctgttgttcaattatcgggcacgcaacttcccggggacgctggattatgccgagcagcaacgctggctggagcaccgtcgccaggtcttcacgccagagtttttgcagggttatgctgatgaattgcagatgctggtacaacaatatgccgatgacaaagagaaagtggcgctgttaaaagcactttggcagtacgcggaagagattgtctaatttgaagcctccgccgctggtacggcggaggacaatgttgagtcaggctttttgaacggtgatgctccacgctgcatcgccaatctgctgataatcggtgatggcatgtccttcttctgccgcccactgtgggattgcttcagttgcctgggtgcaatcaaactcaatcactaactcatcgccgctgaccatttctgccagagctgcttttgcttctatgagtggaaacggacagacctgcgtcaccacatccagctttttaatcaccatctttacaccttacttaatttgccgcagcagttgccagtcgcgccttacgctgcggtcgaacatacacaagccaggacgcagtccagactccgagaatcataaatacaaggccaatccagccctgccaggtcatcattgcagtcataaccagtccattaccgatagagcaaccacctgcaatactggcaccgaagcccatcagtacaccacctaacccgctacgtaatgttgtttgtgcatcagctgcgcgaacgcggaactcacggctcgctttggctgcaataaatgaccccacgaagatccctaacaccaggaaaacgccccagttaatgtatttcatgtcacccgcgaccagaaattgcagaatattggccgttggggaagtgattcctaacccaaacatgcgtccggttgcttcactcaggggccaggctaaaagcgcaatcaaaccgatgagtacagctgtgacaaagggatgccagcgtttttcaaacagaatatgagcgatcccggttcggcgcggcggtaaggtcgcgactttgagttttggcttcttcaactctttcatcaccacccagagcgttatcaccagcaaaacggcaaccaacggccacacagacaaattaaaagtctcagcaatagagttatgttcagtactgtagtgctgcaaggtttgatttaaaccactggcatgtggagaacgcatcaccgcactcatcaccatataagtgaaaagcgcgatccaactgccgatcaatccctcacccgcgcgataccaggtcccggtggcacatccacccgccagaacaattcccagcccgaagatatacccacctataacagtaccaagccacgggaacgccccggcttcgtaagtcagtaggcccgcctgaattaacgcaaaaacccccacgctttgtaccgaaattgcaatcagcaaggcgtaaaacatgcgattatttttcacgatatacatatcgcgaaaaccacctgtcaggcaaaaacgcccacgctgcatgacaaatcccagcagagcaccacaaattagcccgcttaatatcattgaaaacataaattaattaaccagatgaatgttaatgaggaaattattcatgactggtggaatgcagaccaataaccaaattctctaaattagaacaaatggttattaatgaggagttcgatacaaaagaataaaaaaaccggagccaaatgttcattcgactccggtttattattagaaaagatgattatgctacgtcttcgtactgcggaaccggattacggaagctcttggtgacgcaagccaggtaaatcagaccgatagcagcccagatcagacccagaaccattgagctttcttccaggttaacccacagcgcaccaacggtcagcgcaccacacatcggcaggaacagatactggaagtgatctttcagcgtcttgttacgcttctcacggatccagaactgcgagatgaccgacaggttaacgaaagtgaacgccaccagcgcaccaaagttaatcagcgccgttgccattaccaggtcgaagttgattgccagcagggcaatcgcgccaaccaggatgatgttcatcgccggagtacgccatttcgggtgtacataaccgaagaagcttttcgggaatacgccgtcacgacccattacgtacatcagacgcgctacgcctgcatgcgccgccataccggacgccagtacggtaatggtggagaagatcagcgcgccaacctggaacgctttacccgcaacgtacagcatgatttcaggctgtgacgcatccggatctttaaagcgagagatatccgggaagtacagctgcaggaagtaagttgcaaagatgaagatcatgccgccgatcagcgcggtcaggaaaatcgcacgcgggatcacgcgctctgcatctttggtttcttccgacaggttgctgatgccgtcaaagccggtaaaggagaagcacaggattgtcgccccggtaatcatcgggataacatgcgcatcgccagaccagaatggacgagtgctcgccagcgtaccagcgccttcaccttcaaatacgccataaacaaccatgcccagaatcaccgcgatcagcactacctgcaacacgacgattacagtgttgaagttcgctacggatttcagactacgcaggttaaaggcggtcataaaggccaccagcgccaccacaaacatccacgatgggatggaaggcaccagagcttcaaaatagattttcgccagtagaatgttgatcatcggcgcgaacagatagtcgagcagagaagaccaacccaccataaagccgacagtcgggctaatggatttctgggcgtaagtgtatgcagagccagcagaaggatagcggcgaaccagcttcccgtagctcagagccgtaaacaggatcgcaatcaatgcgaacgcataggctgtcggcacatgaccatccgtgaggcctgaaacgataccaaaagtatcaaacagcgtcatcggctgcatataggcaagacccatcattacaaccggaactaacgtaagcgttttacgcaattccacgcgagaggtgtttggagtaacgttatgcgacatggtcattctcctttacggtgataaccgtcgcgtaagcaaaaaattgccccatttttttggattcctcagcgacaacaactgtcgatttttagtaaatatctatccggtacgaagcccggcctcttggtatgaatgattggtttgaagcaaaaaataaccgacgctgatgaaacgtcggtttttagtcattttttgacagcggcgcattgtgcctaaatgggggggaaatgacaagagaatgagaggcttgtcagaataatttttctttaaatggctgattttccgtcatcagattttgcataaacaccggcgatcgcactatttgctaaaatttcatcccgccaccagccactggcaagtcctgcggtctgttcgttccagccaatccagacgggttcaaagagagtttgggcgaccactttcttctcgattaacgcgccactatcgagaaaacgttgcgccagataacggggtaaatagccgcagccgaggccgctaatttgcagctccagtttggttttaaaatcgaaaacggtaatggcttcttgttcgtcgagaagttgtgatgccgtagaagcgcctgcctgcgcagtatcccccaccacaatcgcccgatatcgcttaataatacgacgatttaacggctcttcttccagggctaacggatgatgaggcgcgaccgcaaagacttgttccagatcgcccaaccgtgaaaaaccaaactcactggaagatggtggctcatgcatcgcgccaacaataatatccgctcgcccctgagtcagggcatcccatgaaccaccgagtacgccattgataaacttcaggcgcgtcacgctatgatgttgataaaaagcttcaatgagtggcgcaagcagagaaaaaggaaacgtgtcgtccacgccaatcaccagctcgttttcccagccttcatgcagtttgatcgcctgcttttccagttcccgcacggtatgcagaacttcccgccctttctctaataacatttttccggtgcgggtgaatttagcgcggtgtccgctacgatcaagcaattgaatattaaggtcgctttccagcttgtgaacggtgtaactcagagcggacggcgtcttgtagagtttggccgacgccgccgcaaaactgccttctttttctaaggcatcgaggatcatcaacacatccagcagtggtttcatacacgcccccttgcagtgcatgcggcgtcctgctggcgtgatcgtttactccagcggcattaccagcggatcgggatactggtattcaaatcccagttcattacaaatccgactgccatcaataatcttacctttgccgctgtccagactatttctgaactgcggaggttccagccccagtaaacgggccatctgcggatagaaaacattacgcgcagggtgagctggcgcacatatattatagatgtgtccgcctttaggtgcctgtaacaacagagtgatagcgccaataacatcttctaaatggactaaattaacaccatgttcaccatcaggcgcggtttttccggcaaagaagcgtccgggatgacgtcccggtccgaccaggcccgcaagacgcagaatatcgaccgaagtaccgggtaaattgtgcagccagtcttcgagttcttctaatactcgtccactgttggttactggattacgcggggtggtttctttcaccgtgccttgcgcgtcgccatagacagatgttgagctggtaaaaataatgcggggaatacgatgggccagcgcgctatccactaactcttgtaccgcttgtaaatagaactcatcgccggggccgctacgacgtgccggaagcgtaatgaccagcgcatcggcatccatcagggcatccagatcgtcagaatcgcaaactagctcaggctccatgcgaagcagatagctatcaatgccactcattcgggccgcttcgacaccatcttgtgtggttttactcccggtgacttgccagcctcgcgctgaaagtgacatcgccagcggcatgcctaaccaccctaacccgacaattgcgacctttttcatccgttatctcctgatacaccttagatctataaggctacgctagcgtatcaaaactgacaattcattctatgaatgaatctgttcaataatgataacgacatgctgcaatgagcagtgaatcgtcggtaaccgcgtataccagacggtgctcctctgtaatgcgtcgggaccagaaacctgacaaattatgtttcaggggttctggcttccccttaccttcaaatggcgttctgcgggtatctttgataagttcattgatctttttaacaattcgcttatctgtttcctgccagtacagataatcgtcccatgattcctcagaccagattagtttcactcaatgatgtccttttccgttcctttgcctgatttcaggctatcgattgagtccatcaatctccgggcgttagcgggggagcgcagtagataagccgtctcttccagcgagttgtattcttcgagtgacatcagaacacaagcctctccattctgacgagtaataaggatcggggcatgatcttcaacggctttcatcattgttgccgacaaattctgacgcgcttcgctgtagctaattgtacgcatgtcaatctcctcttttgtacagttcattgtacaatgatgagcgttaattaactatttattaattagtttgtagatcaaggtattgtcagtgagacgaaaatccaggcttcgctatttttggtgccatcagctaagaggacagtcctcttagccccctcctttccccgctcattcattaaacaaatccattgccataaaatatataaaaaagcccttgctttctaacgtgaaagtggtttaggttaaaagacatcagttgaataaacattcacagagacttttatgacacgcgttcaatttaaacaccaccatcatcaccatcatcctgactagtctttcaggcgatgtgtgctggaagacattcagatcttccagtggtgcatgaacgcatgagaaagcccccggaagatcaccttccgggggcttttttattgcgcggttgataacggttcagacaggtttaaagaggaataacaaaatgacagacaacactcgtttacgcatagctatgcagaaatccggccgtttaagtgatgactcacgcgaattgctggcgcgctgtggcattaaaattaatcttcacacccagcgcctgatcgcgatggcagaaaacatgccgattgatattctgcgcgtgcgtgacgacgacattcccggtctggtaatggatggcgtggtagaccttgggattatcggcgaaaacgtgctggaagaagagctgcttaaccgccgcgcccagggtgaagatccacgctactttaccctgcgtcgtctggatttcggcggctgtcgtctttcgctggcaacgccggttgatgaagcctgggacggtccgctctccttaaacggtaaacgtatcgccacctcttatcctcacctgctcaagcgttatctcgaccagaaaggcatctcttttaaatcctgcttactgaacggttctgttgaagtcgccccgcgtgccggactggcggatgcgatttgcgatctggtttccaccggtgccacgctggaagctaacggcctgcgcgaagtcgaagttatctatcgctcgaaagcctgcctgattcaacgcgatggcgaaatggaagaatccaaacagcaactgatcgacaaactgctgacccgtattcagggtgtgatccaggcgcgcgaatcaaaatacatcatgatgcacgcaccgaccgaacgtctggatgaagtcatcgccctgctgccaggtgccgaacgcccaactattctgccgctggcgggtgaccaacagcgcgtagcgatgcacatggtcagcagcgaaaccctgttctgggaaaccatggaaaaactgaaagcgctgggtgccagttcaattctggtcctgccgattgagaagatgatggagtgatcgccatgagctttaacacaatcattgactggaatagctgtactgcggagcaacaacgccagctgttaatgcgcccggcgatttccgcctctgaaagcattacccgcactgttaacgatattctcgataacgtgaaagcacgcggcgatgaggccctgcgggaatacagcgcgaagtttgataaaaccacggttaccgcgctgaaggtgtctgcagaggagatcgccgccgccagcgaacgcctgagcgacgagctaaaacaggcgatggcggtggcagtaaagaatattgaaaccttccacactgcgcaaaaactgccgccggtagatgtagaaacgcagccaggcgtgcgttgccagcaggtcacgcgtccggtagcttcagttgggttgtatattcctggcggctccgccccgctcttctcaacggtattaatgctggcgactccggcgagtattgcgggctgtaaaaaagtggtgctgtgctcaccgccgccgattgccgatgagatcctttatgcggcgcagctgtgcggtgtgcaggacgtgtttaacgtcggcggcgcacaggccattgccgcactggcgtttggtacggaatctgtgccaaaagtggacaaaatcttcgggccgggtaacgcctttgtcaccgaagcgaaacgtcaggtgagccagcgtctggacggtgcggcgatcgatatgcccgcaggcccgtcggaagtgctggtgattgctgacagcggcgctacgccggatttcgtggcttctgatttgctctctcaggctgaacacggcccggactcacaggtgattttactgacgcccgctgctgatatggcgcgtcgcgttgccgaggccgtcgaacgccaactggcagaactgccgcgtgccgaaaccgcccgccaggcactgaacgccagccgcctgatcgtgactaaagatttagcgcagtgcgtggagatctccaaccagtacggcccggagcacctgatcattcagacccgcaacgcccgtgaactggtcgatagcatcaccagcgccggttcggtatttcttggtgactggtcaccggaatcggcaggtgattacgcctccggcaccaaccacgttctaccgacttacggttacaccgccacctgttccagcctcgggctggcagatttccagaagcgcatgaccgtacaggaactgtcgaaagaggggttctccgcgctggcttcaaccatagaaacactggccgccgccgagcgcctgaccgcccacaaaaatgccgttactttgcgtgttaacgcccttaaggagcaagcatgagcaccgtgactattaccgatttagcgcgtgaaaacgtccgcaacctgacgccgtatcagtcggcgcgtcgtctgggcggtaacggcgatgtctggctgaacgccaacgaataccccactgccgtggagtttcagcttactcagcaaacgctcaaccgctacccggaatgccagccgaaagcggtgattgaaaattacgcgcaatatgcaggcgtaaaaccggagcaggtgctggtcagccgtggcgcggacgaaggtattgaactgctgattcgcgctttttgcgaaccgggtaaagacgccatcctctactgcccgccaacgtacggcatgtacagcgtcagcgccgaaacgattggcgtcgagtgccgcacagtgccgacgctggacaactggcaactggacttacagggcatttccgacaagctggacggcgtaaaagtggtttatgtttgcagccccaataacccgaccgggcaactgatcaatccgcaggattttcgcaccctgctggagttaacccgcggtaaggcgattgtggttgccgatgaagcctatatcgagttttgcccgcaggcatcgctggctggctggctggcggaatatccgcacctggctattttacgcacactgtcgaaagcttttgctctggcggggcttcgttgcggatttacgctggcaaacgaagaagtcatcaacctgctgatgaaagtgatcgccccctacccgctctcgacgccggttgccgacattgcggcccaggcgttaagcccacagggaatcgtcgccatgcgcgaacgggtagcgcaaattattgcagaacgcgaatacctgattgccgcactgaaagagatcccctgcgtagagcaggttttcgactctgaaaccaactacattctggcgcgctttaaagcctccagtgcggtgtttaaatctttgtgggatcagggcattatcttacgtgatcagaataaacaaccctctttaagcggctgcctgcgaattaccgtcggaacccgtgaagaaagccagcgcgtcattgacgccttacgtgcggagcaagtttgatgagtcagaagtatctttttatcgatcgcgatggaaccctgattagcgaaccgccgagtgattttcaggtggaccgttttgataaactcgcctttgaaccgggcgtgatcccggaactgctgaagctgcaaaaagcgggctacaagctggtgatgatcactaatcaggatggtcttggaacacaaagtttcccacaggcggatttcgatggcccgcacaacctgatgatgcagatcttcacctcgcaaggcgtacagtttgatgaagtgctgatttgtccgcacctgcccgccgatgagtgcgactgccgtaagccgaaagtaaaactggtggaacgttatctggctgagcaagcgatggatcgcgctaacagttatgtgattggcgatcgcgcgaccgacattcaactggcggaaaacatgggcattactggtttacgctacgaccgcgaaaccctgaactggccaatgattggcgagcaactcaccagacgtgaccgttacgctcacgtagtgcgtaataccaaagagacgcagattgacgttcaggtgtggctggatcgtgaaggtggcagcaagattaacaccggcgttggcttctttgatcatatgctggatcagatcgctacccacggcggtttccgcatggaaatcaacgtcaaaggcgacctctatatcgacgatcaccacaccgtcgaagataccggcctggcgctgggcgaagcgctaaaaatcgccctcggagacaaacgcggtatttgccgctttggttttgtgctaccgatggacgaatgccttgcccgctgcgcgctggatatctctggtcgcccgcacctggaatataaagccgagtttacctaccagcgcgtgggcgatctcagcaccgaaatgatcgagcacttcttccgttcgctctcatacaccatgggcgtgacgctacacctgaaaaccaaaggtaaaaacgatcatcaccgtgtagagagtctgttcaaagcctttggtcgcaccctgcgccaggccatccgcgtggaaggcgataccctgccctcgtcgaaaggagtgctgtaatgaacgtggtgatccttgataccggctgcgccaacctgaactcggtgaagtctgccattgcgcgtcacggttatgaacccaaagtcagccgtgacccggacgtcgtgttgctggccgataaactgtttttacccggcgttggcactgcgcaagcggcgatggatcaggtacgtgagcgcgagctgtttgatctcatcaaagcctgtacccaaccggtgctgggcatctgcttagggatgcaactgctggggcggcgcagcgaagagagcaacggcgtcgacttgctgggcatcatcgacgaagacgtgccgaaaatgaccgactttggtctgccactgccacatatgggctggaaccgcgtttacccgcaggcaggcaaccgcctgtttcaggggattgaagacggcgcgtacttttactttgttcacagctacgcaatgccggtcaatccgtggaccatcgcccagtgtaattacggcgaaccgttcaccgcggcggtacaaaaagataacttctacggcgtgcagttccacccggagcgttctggtgccgctggtgctaagttgctgaaaaacttcctggagatgtgatgattattccggcattagatttaatcgacggcactgtggtgcgtctccatcagggcgattacggcaaacagcgcgattacggtaacgacccgctgccgcgattgcaggattacgccgcgcagggtgccgaagtgctgcacctggtggatctgaccggggcaaaagatccggctaaacgtcaaatcccgctgattaaaaccctggtcgcgggcgttaacgttccggtgcaggttggcggcggcgtgcgtagcgaagaagatgtggcggcgttactggaagcgggcgttgcgcgcgtagtggtcggctccaccgcggtgaaatcacaagatatggtgaaaggctggtttgaacgcttcggtgccgatgccttagtgctggcgctggatgtccgtattgacgagcaaggcaacaagcaggtggcagtcagcggctggcaagagaactcgggcgtttcactggaacaactggtggaaacctatctgcccgtcggcctgaaacatgtgctgtgtaccgatatctcgcgcgacggcacgctggcaggctctaacgtctctttatatgaagaagtgtgcgccagatatccgcaggtggcatttcagtcctccggcggtattggcgacattgatgatgtggcggccctgcgtggcactggtgtgcgcggcgtaatagttggtcgggcattactggaaggtaaattcaccgtgaaggaggccatcgcatgctggcaaaacgcataatcccatgtctcgacgttcgtgatggtcaggtggtgaaaggcgtacagtttcgcaaccatgaaatcattggcgatatcgtgccgctggcaaaacgctacgctgaagaaggcgctgacgaactggtgttctacgatatcaccgcttccagcgatggccgtgtggtagataaaagctgggtatctcgcgtggcggaagtgatcgacattccgttttgtgtggcgggtgggattaagtctctggaagatgccgcgaaaattctttcctttggcgcggataaaatttccatcaactctcctgcgctggcagacccaacattaattactcgcctggccgatcgctttggcgtgcagtgtattgtggtcggtattgatacctggtacgacgccgaaaccggtaaatatcatgtgaatcaatataccggcgatgaaagccgcacccgcgtcactcaatgggaaacgctcgactgggtacaggaagtgcaaaaacgcggtgccggagaaatcgtcctcaatatgatgaatcaggacggcgtgcgtaacggttacgacctcgaacaactgaaaaaagtgcgtgaagtttgccacgtcccgctgattgcctccggtggcgcgggcaccatggaacacttcctcgaagccttccgcgatgccgacgttgacggcgcgctggcagcttccgtattccacaaacaaataatcaatattggtgaattaaaagcgtacctggcaacacagggcgtggagatcaggatatgttaacagaacaacaacgtcgcgaactggactgggaaaaaaccgacggacttatgccggtgattgtgcaacacgcggtatccggcgaagtgctaatgctgggctatatgaacccggaagccttagacaaaaccctcgaaagcggcaaagtcaccttcttctcgcgcactaaacagcgactgtggaccaaaggcgaaacgtcgggcaatttcctcaacgtagtgagtattgccccggactgcgacaacgacacgttactggtgctggcgaatcccatcggcccgacctgccacaaaggcaccagcagttgcttcggcgacaccgctcaccagtggctgttcctgtatcaactggaacaactgctcgccgagcgcaaatctgccgatccggaaacctcctacaccgccaaactgtatgccagcggcaccaaacgcattgcgcagaaagtgggtgaagaaggcgtggaaaccgcgctggcagcaacggtacatgaccgctttgagctgaccaacgaggcgtctgatttgatgtatcacctgctggtgttgttgcaggatcaggggctggatttaacgacggtaattgagaacctgcgtaaacggcatcagtgagttgcggggtaagcggatgcgatattgttgccgcatccggcaaaaaaacgggcaaggtgtcaccaccctgccctttttctttaaaaccgaaaagattacttcgcgttgtaattgcgtagagcattacgccccagcacaatccccgcgccaaccatgccacccagcagcaccgccagaatcaaggtaattgcctttttcgggctatcacgacgaataggtaacatcggtttcatcacataacggtaagcatgaatatcaagatcatcaacttttaagctttcgatatccagcaggttttgacgagtctgatagtagtttggcgagaacaccaacggacgggtcgcctcatgcttaatcatcgactccagcgcttcgctccccaaaaggaacaacgtatcttgtgtgatatcttcgccagtctgttgaatctgcggttttgtcacctgcgcctgattcgcatactgcaacgcttcctgaatctgacggatacgcagatctttctgctcctgcgcgactacttcctgcgttcttaaagagtcctgcaagtttttccgtcccagagcaatgttgtctttgagatccttttctagctcttgattcactttatcgtcaacttgctgaatgtattgggccaacttcatttgtgcgccctctgcagtttgcccaacataagaaacagtcaatggtaattgctggttcttaacagaaggttcgatggtaagtttttctcgttcttcctgattatccagcgtttctgctaatgcagagaaggcagaactgaagcgaccaattaacgtctcctgcaaatccgatactttcggtgcagcctgaccatagataacattcatggcattgttatagccagcaatttgccccacgtcgggctgagtgataattgctgttgacgtccatttctccttcgctactgccaaatatccaatagccagggcaatagccacaatgacggaaatgatgattgtcatcttgccacgccacaactgcactagtaaatcaatcaaatcaatctgttccgggtcatggttttgcccagaaacattattattttctactctcatcattaccctaactgacggaaatttccaagtccgcatagtttagcgataatcctcgtgaatgctataggataagtgataaaaataatgaattgttgtgtaagtaacaaaagacaatcagggcgtaaatagccctgataacaagatgttagtcgctgccaaagagatcgcgggtgtataccttatctgccacatccttaagctcttctgccattcggttagagataatgacgtcggcttgttgtttgaaggtggcgagatcacgttccaggcgagagttgaagaatgagtcttctttcatcactggctcgtagatgatcacttcaacacctttcgccttgatacgtttcataatcccctgaatagaagacgcacggaagttatctgaaccgctcttcataatcagacgataaatacccaccacttgcggcttgcgtgacaaaatggcatcggcaataaaatctttacgcgtgcggttagcatcgacaattgccgagatcaggttattcggcacagactggtagttcgccagtaactgcttggtatctttcggcagacaataaccaccataaccaaacgacggattgttgtaatggttgccaatacgtgggtcgagacaaacgccttcgattatttgacgggaattcagacctaaactttctgcatagctatccagttcgttaaagtacgccacgcgcatcgccaggtaggtgtttgcaaaaagtttaatcgcttctgcttcagtggagtcggtaaacagcatcgggatattttgcttaatcgcgccttcctgtaacagagcagcgaaacgttctgcgcgttctgaacgctcaccgatgacaatacgtgaaggatggagattatcgtaaagggctttaccctcacggagaaattccggggagaatataatattttcagtgcgatatttcttatgcatcgctgcggtaaaaccaacgggaaccgttgatttgatgaccataaccgcataaggatttatctcaactacgtctttaattactgattctacactggatgtattgaaataattagttttaggatcatagtcggttggagtggcgatgatgacataatcagcatcccggtaggcttcatttttatctaatgtggcattaaagtgtattttatctgattgcaaaaactgctgaatttccttatcaacaataggagatatccgatcattcagcatagcaacgcgtgacggtaaaatatctaatgccacaacctcatgattttgtgcgattagaagcccgtttgacaagcctacatagccagtaccggaaatggtgattttcatttcatgctctcagaattaacttaactgtgaatcatgatgtttttagcatcctgataagagctaaaagttttaacgctacgttgttcgatggtcaacgcaacgaaaaacaattcagattttctttataagaatagctgatatttattaagttaatattaagcagtgaaatttagtctataagatatttggcaaaaaaaagcccggtgcaatatacgccgggcctcaattttattgttggttaaatcagattaatccagccattcggtatggaacacaccttctttatcaatacgcttataagtatgcgcaccaaaatagtcacgctgtgcctggatcaggttcgcaggcagaacagcagcacggtagctgtcgtaataggcaaccgctgcggagaaggtcggaaccggaataccgttctgtactgcataagcaacgacatcacgcagcgcctgctggtagtcatcggcaatttgcttgaagtacggagccagcaacaggttagcgatctgtggattttcggcataagcatcggtgattttctgcaggaactgcgcacggatgatgcagccagcacggaaaatcttcgcgatttcgccgtagttcagatcccagttgtactcttcagacgcagcacgcagctgagagaagccctgggcgtaagaaacgattttgcccagatacagcgcacgacgaactttttcgatgaactcagccttgtcgcctgctggctgtgcttgcggaccagagagaactttagatgcggcaacacgctgatctttcagagaagagatataacgtgcaaacacagactcggtaatcagcgacagcggttcgccgagatccagcgcgctctggctggtccatttaccggtacctttgttagccgcttcatccaggatcacatcaaccaggtagttaccgtcttcatcttttttggtgaagatatctttggtgatgtcgatcaggtaactgctcagttcaccgttattccactcggtaaaggtctgcgccagttcttcgttggtgaggttcaggccacctttaagcagagaataggcttcagcaatcagctgcatatcgccgtattcaataccgttgtgaaccatcttcacatagtgacctgcgccatcggcaccaatataggtaacgcatggttcaccgtcttcagctacggcggcgattttggtcaggatcggtgctaccaattcataggcttctttctggccaccaggcataatagaaggacctttcagcgccccctcttcaccgccagaaacaccggtaccgatgaagttaaagccctctgctgaaagctcacgattacgacgaatagtgtcctggaagaaggtgttaccaccatcaatgatgatgtctcctttatcgagatatggtttgagggaatcaatagcagcatccgtgcctgcacctgctttcaccattaacaggatgcgacgaggcgtttccagagattcgacaaactctttcaccgtatagtaaggaaccagtttcttgcctggattttcggcaatcacttcttccgtcttctcacgggaacggttgaaaatagagacggtataaccacggctttcgatgttgagcgcaaggttgcgtcccatcactgccataccgactacgccgatctgttgcttggacattacatactcctgtcaggtgtgatcaccgcgctgaatgctcgcggcctggaatgttcgcaaataagtatacaaagtacttattaaagtataaatagcttatccatgcttatatgcttacggctttatattacgggtgaaaaactgatgaaattcgatcaaagttgcgatttgataaaatacgttttctggctaaatatctaaaagtactttttaagtgccatctgaaggcttttgaaaaaaaacttcgattgtcatgatgagcataatgtatcgcatgaaaagcgggaacataatgaagtctgacaccagccaggctaagcctcaagcacaggtcaatatcttcacagtacataaagtaaccttgatcgaagccatttacacgcacaaaatctgaaaaacgtaccagcataaatgatcctgcgcaccaatcaacaaccgtatcagaatagatactttctttaggaatttttgttttattaaggaaggtgcgaataagcggggaaattcttctcggctgactcagtcatttcatttcttcatgtttgagccgattttttctcccgtaaatgccttgaatcagcctatttagaccgtttcttcgccatttaaggcgttatccccagtttttagtgagatctctcccactgacgtatcatttggtccgcccgaaacaggttggccagcgtgaataacatcgccagttggttatcgtttttcagcaaccccttgtatctggctttcacgaagccgaactgtcgcttgatgatgcgaaatgggtgctccaccctggcccggatgctggctttcatgtattcgatgttgatggccgttttgttcttgcgtggatgctgtttcaaggttcttaccttgccggggcgctcggcgatcagccagtccacatccacctcggccagctcctcgcgctgtggcgccccttggtagccggcatcggctgagacaaattgctcctctccatgcagcagattacccagctgattgaggtcatgctcgttggccgcggtggtgaccaggctgtgggtcaggccactcttggcatcgacaccaatgtgggccttcatgccaaagtgccactgattgcctttcttggtctgatgcatctccggatcgcgttgctgctctttgttcttggtcgagctgggtgcctcaatgatggtggcatcgaccaaggtgccttgagtcatcatgacgcctgcttcggccagccagcgattgatggtcttgaacaattggcgggccagttgatgctgctccagcaggtggcggaaattcatgatggtggtgcggtccggcaaggcgctatccagggataaccgggcaaacagacgcatggaggcgatttcgtacagagcatcttccatcgcgccatcgctcaggttgtaccaatgctgcatgcagtgaatgcgtagcatggtttccagcggataaggtcgccggccattaccagccttggggtaaaacggctcgatgacttccaccatgttttgccatggcagaatctgctccatgcgggacaagaaaatctcttttctggtctgacggcgcttactgctgaattcactgtcggcgaaggtaagttgatgactcatgatgaaccctgttctatggctccagatgacaaacatgatctcatatcagggacttgttcgcaccttccttaatccctaacataaatgacacaataaaatcagaaagcacaggaaattttcttacggaataatcatgtaaagatttcgcttcatctcggaacaggcataatgtactaaaagcataacgcttactttcgacatatttaatatatgtcagcaaatcatcatgcttcatgatgatatcgggattcaaaaacaaaatgtaatcatcatctgcgggtctatatttttcctttacatacgccaccgcaatattattattatgaccaaagccgtatacacctccactaatatagtccaggcctgcataatgctggcatatttgtttcaataatagagagtctttgttgtcgcgtacgataatcttgtagtgctcatcgtcagcattaagattttcgagtaattttttgatgtagtcttcatgtccgtgggaaacgattattatatataccatttcaatgttcttcagtaataaaattaactagttcatcaaacccaactaatacattttcattacgataaatgaaatttgcatcagagatatcttttttgaggttaccttttttgaagtcaataataagtttaactaacatgtcatcgttattagaatcaaaaaaagctttcttttcataactaccaagagtttctctagtaaatgggaaatctgatgctaatacccacttacctcgctctttagcttcagacaacggcaatccccatgtttctaacctagagggaaaacaaactatatctgaaatattataacaatgatcgattttttctttatccaagtacccgaggaaatgaacattatccagtccttctgcaagactgataatatattttgcatacgcattttctgtaccactgatagtaagcagaaatttaatattggattgttctttcaatttccttgctgcactaataataagctcgtaatttttaaatactcgtggaacagcagggtaaaatattgtcaactcagaagggttattcttaaattgagaatcatcatcagtaagttggcttttatcagataatttaatttctggccgactgacaatgatgttatttatagaatatttcttgataaatttttctttcatccagaattgttgaacaaacactgcagtattttttttaatgtttattttatatatcagcccgtatagcattttaaataagaaaaagctaggctccataagaatttcacggaataaaattcctttataaaaaggtgcagggttatgacaatacacatatctttttttagtgacgacattggccgtaatatcatgcagacaaatccaatgcgtagcattcagctcttttgaaagttttttacaaactacatattcaaagtgcaaacgttttagccacgaccctttaacctcaggaaactcaatgaatttaacccatggataactttcttttaactctttagcagaatggactaatgcgataaaactgacattttctttattattagttgctgccaaaaattttttcaaaatggtaaatggaccgccagtggtaaaattgaccgcagaaacaacgactatgctttttcccataatttggtctcatgattgtatttctttatgatttttgctggtactcccgcaatgacagtattttcgggaatagaacctctaacaacagaattggcgccgactacgactccattaccaataattgttccaggcaaaaccgtcacattctcacccaaccaaaccctctggccaattacaacagctgaagattccaacgtgcgcatgtctggaggtatatttggcgaactcattggatcagagtgcttaaaggaaccgtgattatgatcggtaataaatactttacttgcaataagcgtatcccgacctatcgtaacgctctcaattgaggcgatatgaacatagtcgttaacttgcacattatcggaaaaaaaaatcacgccacgtccaaatgcatccagcctgagaccgactccacttgtgaaattttcaccaaaattaatgctaccatcattgcgaatatagcagggaaatcgaataattctacagttccggtaaaatacacgagtcaataagacatctctaacaagccgaataaaaccacagagaccatatcgtttagcgagttttaagatcatcgatcacctcttcaagaacatccctgaagtaacttcctgttcgaattttctgagaaataatttttgtattctcactaatttgcttataagtttctattgtcatggagtcaacaatctcttgcatttctttgattgatcccactgcatatcctattctattatctacaatgaaatccgcaagggcggctttatcccatataaatactggaagttccattgaaagataaagagatgtcttatgagggttattaaactttaaatagtcgccaaaggcaccactacaggtttcgacagaatctccatcccaaatgagtccaaattgcatgcctgggaggttaatcttttccggagattgagcatcaaaacttccaagatatttaggattatctttattttcatagttgacaccaaagagagtaaaatcgcatccttcagtatatatgaaagaacatttatgcctagaaaggttgccagcatatatgacccctcgttgcttatccgtaacatctcgatgctccacatcagatgagacgaggtaatcaaatatttttatgtctttgattttatcctgagacatatatttactaaggtactttgtcatttgtggattgtgacttatgaccatatcacaggtagcaagccgcacagaatcactaccccctcctcctcttaattcatcaatatcatgaatcagaggtactattctaaattttagaaggcggtgaaagaatgacaatatatgccaaaatggtttggccatcgggaaattgaaaattaaaacatctttattttcaagaccgcagagaaatgtactaagcttaacagaactaataattctctggactactccaccccatagaggaatgttaacaacagaaatgttttcataatctgaagcaatgtccagtgcatcttttcttgctttaaatccagcatcgcgtctagagaaatttaaatcattcaaaaaatacattttcactttattttctgggccttaagaaattgagagaatactatgatacaaagagttatttgtatccaactgctaatattagtcatgaagctttcatgataaaaaatgaaagaaaaggtataaataaaatatgaataaaatattttcacagatatgtaatttcgagacaatctccataaaacacctgaaatacagccatgaataaccatcatcaaatagcttagctccgcggaaatataaacataatccgaaaaagcagtataaacatttgttggcaaacccacccacacaaattctttatgcaacgacatagagactccacctgttaatagccccatcagcctttcaaaaaaccaaaagacatgagaactggcagagttagatacttgctgaaaataaaactcctgaaacgcgattatagggctgaccaaatacatggatagataatatgccatccccccaggcagtccacgtaaaaagagcatatacaaggagaatagaacacctacagctgtaataagataaacataatgttttactctattaacacctacgatgaatgcataagagatgataaccataaagacaatttgcttaccagtattcagtataattgcaaagatgaatacaataaaaacaagtaaagtaaatgttttacttacctttgtattagtaaattttttagaccaaataaataaagcaaaagtagttagaatgattggctgcatgtatgctgagaaatttcttgatgtgtcttcaacatcagcatctcttatcaaattcatatagctaagtaagctagtcccgaactggtagttacttaacctcatgcatatatatatcatcgaaaaagaaataactaacaagcctacattatgcactttcttcgatggtatgctataaatagcattattgacttttctgatatttagatctaatacactttccgtcaataaacatgacagggtaaatgtcaaaacattgcaaagtagaaaaatcaacgtagcgtcatttaactgaaaagcatatatatctgacgttatttcatatcccaataagaccagtgcgaagatgatattaacgcatacggctggataaaatatatccttcttaagatataaacagataaatgctgtaatgagaaagacactaattacaagatagatcattaatccgtactcattatatttttcacttgataaagagcggcagatatcacttgatgcatatcataatatttatactcggccaaacgcccgccaaatataaccttgtcttctctgctagctaactctctatatttcttaaaaagctccatgtttttattatcattaactggatagtagggttcgtcgccaactttccactctaatggatattcttttgtaacaaccgtatgctttgtctcaacatagtcaaaatgtttatgctcaattattctggtatatggtacattagcatcagtgaaatttattactgcattcccttggaagtttggaaattcatggcgttccgtctcaaattttaaagagcgatattctaacgctccaaacctatagtcgaagtactgatcaatgggtccagtgtagatgattctatgggctttactcgctagagaatctttgtctttcaaaaaatcaatgcctaattttacgtccacaccttcaagcattttttcaataagcttagtgtagcctcccaccggaataccttgatagcgatcggaaaaataattgttatcaaacgtaaatctcactgggattcgcttaataataaatgcaggcaattcttttgcacttcttccccactgcttctccgtataaccctttatcaatgcttggtataagtcctccccaactaatgaaatcgcctgctcctccaaattttcaggtaccttgtcaccatacttttttttctgagcattaatgatattttgagcttcttgaggatctttaactccccacatttggtggaaagtattcatattaaaaggaaggttgaataatttgtctttataaatcgccagtggagaattagtaaaacgattaaattctactaaatcattaacgtaatcccatatatatttatcattggtatgaaaaatatgtgcaccatatttatgaatctggataccctcacagtcctctgtgtacgcatttccaccgatatgatttcttttctcaatcactaaaacttttttgtttagcttttttaactcattcgcacaaacggcaccaaacaaaccagaaccaacaatgatataatcgtacataaaatcctcagcaaaccagtaatttattatttcttacgaacatcagcatgagtgacgtaactaagcactctgttgcaagcaatgttattgctgcaccaatctctttaaaaagagttgttagcggaaaaatcaacaacaaactcaacaaacccgcagcgattaaaatcttactgaattctttcttataattatgggtcagcataacttgaatgccatagacattacttaatgaaataagaaaaggcagaggcgatataatcattagcacaatcactgcattatcatatcccggccctatacttatttttactagtatagatgcacccaagagcagaattaatgaaaaagcaccaccaatcaaactcaagcaggtcaatgattttttaattaaaatcacacccttcacacgattaagaacaagcgtacttgatattcttgggtatattgcttgggtgataggatttaatagcccttgaagcgcgtttcttatagtattggccgcattaaaattccctacggacgttggtccagatataaatcccaggataataactattcccgtagaatataaactaatagcagatgtggaaataaaaacatgaaaaccgtctgctaaagatcgacgcacattatgtaatgatagcgtaactttaccaatccaaccttcatgaacaacgatagctagtgcaataattccagcaaccagatttgcacttgactgaataaaaccggcaattgctatatctgactttgtgttcacaaaaataaatgttagagggataatagccaagcgggataaaatactacttaaagtcagccatttcattttttcttttccctgaaacagccagatagggtagattaaattcccgactaatgcaggaacaaacgaccatataattacggcatgcttgttatattcaggaacaagcaaggtcatcgacgttaagaaaatcaatgtaatgacgataagaactatttttgaaaatatcaccgcccaaaaaatagacgttactttatctttactatctgctgctttggcaatactctgagttgctgtgagattgaaaccatattcaacaaacattatcatatatagcatagtcgcttggcaaaaaccgaatataccgaaattttcaggaccaagtgttcttacaagatatggaaatgtaagcaatggtaaaagataattgctaccttgaacgacagccagatatataacgtttcttcttaaagataatttattcgtattcatgcaattaattttaatctgataagctcatctaacgtaaagagcctttcatcttttggcgaaaggattaaccctgatgtttggggccaatcaattgcaatgcgttcatcattccaacatattccacaatcgctttcaggatgataatagtttgtagttttatattgaaattcagcgatatcagacagaaccaaaaagccatgagcaaacccttttggtatccacaactgctgcttattatcagctgaaagcagaacaccaacccatttaccaaaggataccgaattgggtcgaatatcaacagcaacatcaaaaactgctccatgagtgcagcgtacaagtttatcttgtgcgtactcgccgcgttgaaagtgaaggcctctgagtacattttttgatgaacgtgagtgattgtcttgaacaaagctgaccggatagcctagaatatgttcaaatgctgattgattaaagctctcataaaagaaacctctatcatcaccaaatactcttggctccagaattagcacatcttcaatttcagttctaatcacattcattaatttgaatccttcgtcattttataaagatactgcccataattattctttattagtggtacagctaattttcttacttgctcaacatcaataaaacctttacgaaatgcaatctcttcaggacaggaaaccttcaatccctggcgctcttcaattgtcgcaataaaattacttgcttctatcagactctgatgagtccccgtgtccagccacgcgtagccacgccccatcatcgcgacagacagacgtccctgctcaagataaatacggttaatatctgtaatttctaactcaccacgtgcagacggcttcaagtttttcgccatctgaaccacgtcgttatcataaaagtacagacctgtaacggcgtaattactctttggttctaacggtttttcttccagactgattgccgtaccgtttttatcaaactcaacgacaccatagcgttctggatcattaacgtgataggcaaataccgttgcaccactttctttgttaacagcggcctccattagcttcggcagatcgtgaccgtaaaagatattatcaccaagaaccaaagcacaatcatcaccaccaataaactcttcaccgatgataaatgcctgcgcgaggccatctgggctaggttgcactttgtactgaagattcaggccccactggctaccgtcacccagcaattgttgaaaacgaggagtatcctgaggtgtactgataatcaaaatatcgcgaatacccgccaacatcagtgtagagagcgggtaatagatcatcggtttatcataaataggtaatagctgtttactgacagccatagtcacaggataaagacgtgtaccagaaccacccgctaaaataatacctttacgcattttcatttcatcattccttttaattcatcttgctccaccatcacgaacaagatgcaaaaactattaaattgctgtagtcgtaaataattcattgagcattcgtttcacgccaacctgccagtcaggcaagacaagcgcaaagttctgctgaaatttttctgtattaaggcgagagttatgtggacgacgagctggtgtaggataggctgttgttggtactgcgttgagcttgttgagtgcaaggggaatgcctgctttgcgcgcctcttcaaaaaccagcgcagcataatcgtaccaggttgtggtaccactggctaccaaatggtacaagcctgcgacatccggtttattcagtgcgacacgaatggcatgtgctgtacaatcagccagcagttcagcacctgttggcgcaccaaactgatcgttaataaccgctaattcttcacgctcttttgccagacgtaacatcgttttggcgaagttatttccttttcctgcatagacccagctggtccggaaaataagatgcttcgcgcaatattcctgtaacgctttttctccggctaacttggtttcaccgtaaacatttagtggtgcggttgcatccgtctccagccatggcatatcgccatttccagggaagacgtaatcagtcgagtaatggataacccaggctccaacttcatttgctgctttcgcaatcgcttcgacacttgttgcgttaattaattgtgcaaactccggttctgattctgctttgtctactgcggtgtgagcggctgcattgacaataatatccggccgaatgcttcttacggtttcagctacaccttcaggattactaaaatcaccgcaataatcagtagagtgaacatcaaaagcaatcaaattacccaaaggtgccagagcacgctgtagttcccaacctacctgccctgttttgccaaaaaggaggatattcattactggcggccctcatagttctgttcaatccacgattgataggcaccacttttcacattatcaacccattttgtattggacaggtaccattccaccgttttacgaatcccgctctcaaacgtttcctgtggtttccatcccaatgcgcgaccaatcttctcagcatcaatagcatagcggcgatcgtgtcccggacgatcagcaacataagtgatttgctcacgataagatttctctttcggtacaatctcatccagcaaatcacaaatagtgagcactacatcgatgtttttcttttcgttgtgcccaccaatgttataagtttcacccgctttaccttcggttacgacggtatataacgcacgcgcatgatcttcaacatacaaccagtcgcggatctgatctcctttgccataaataggtaatgccttaccttccagtgcattaagaataaccagtggaataagcttttccgggaaatgataaggaccatagttgttcgagcaattagtcacaattgtcggtaaaccatatgtacgtttccacgcgcggactaaatgatcgctggatgctttggatgcggaataagggctgcttggcgcgtaagctgtcgtctcagtaaataagggtaattcttctgtattatttacttcatctggatgaggcaaatcaccatagacttcgtcagtagaaatatgatgaaaacggaagctatttttcttgtcgctatcaagagcagaccagtaattgcgagcggcttccaaaaggacataagtaccaacaatattggtttcaataaatgccgcagggcctgtaattgaacggtcaacatggctttcagcagccaggtgcatcactgcatccggctgatgctgagcaaaaatccgtgccattgcaggtgcatcgcaaatatccgcatgttcaaaaacatagcgttcagaatcagaaacatcagcaagtgattcccggtttccggcgtacgttaatttatcgacattaacaacactatcctgcgtattatttataatgtgacgaactacagctgaaccaataaatcctgcgccaccagtaacaagtattttcacttaatttattccatattacttcagagcatgctgtgaaataagcggctctcagtttgattaatagaggtattaatgcacgctaccgcccctggctttacagctaccagagcactgcatgcatgcctatgatgtgacgagcgttacccactcgcgctaaacccgaaaaattcaaacgctaattgtcttaccaatccgctctggaaacaaggaaaatcctggaaaactttgaataaaaccctactgctaactcgttgttattctgatggtttatataaaacaacggcaggaagattcgcaacaaattacttttgctgcgaattttcactgccgttataattttcttatcaaccgttacatccggtcagattttcattattcgcttaacagcttctcaatacctttacggaacttcgccccttctttcaggttgcgtaggccatacttcacaaacgcctgcatatagcccatttttttgccgcagtcgtaactgtcgccggtcatcagcattgcatcaacggattgttttttcgccagctcggcaatagcatcagtcagctgaatacgtccccatgcaccaggctgagtacgttccagttccggccaaatatcggcagaaagcacatagcgacctacggccatgatgtctgagtccagcgtctgcggctgatccggtttttcgataaattcaacaatgcggctgactttaccctcacggtccagcggctctttagtctggatgacggagtattcagagaggtcacccggcatacgttttgccagcacctggctgcggcccgtttcgttgaaacgtgcaatcatggcagcaaggttgtaacgtagcgggtcggcgctggcatcgtcgatcacaacgtctggcagtaccacgacaaatgggttgtcaccaatggcaggtcgcgcacacaaaatggagtggcctaaacctaaaggttcgccctgacgcacgttcataatggtcacgcccggcggacagatggactgtacttccgccagcagttgacgcttcacgcgctgctcaaggagtgattctaactcataagaggtgtcgaagtggttttcgaccgcgttcttggacgcgtgagttaccaggaggatttctttgatccctgcagccacaatctcgtcaacaatgtactgaatcattggcttgtcgacgattggtagcatctctttgggtatcgccttagtggcaggcaacatatgcatcccgagacccgctacaggaataactgcttttaaattcgtcattatttcatccacctgtaaaatggttgctgaattatagcttgttcgatttttttcgccagcatcaattaccctgaattgattactgaattacttgtgatgttacgccgcttcgttgtggattgcagtagcattgttcctaagtatgactccatttttccaggaatggtcgcaaatctactccctcagttccggcaatctaaagttaatcttctccacattaacaatatggtgattaatcctgtcgatatcgacggagctttgtcctttttcattcaccgcatgaacatttgcaagagacagcagtgtttcttttttcgccataaaaacaccacgaacgtctttgcgcatgtcaaagttcatgctcaatgcgggtccaactgaggattcctgcatcacattgatatttcgcataaaaaaatgttgcggtttgttgtgtaactccagcgacgcacgcttcatctcaatgttagttagcgccacaaaggaaacagcattcccggcggagatttgaatgccgcgcaatttataagcaagatgagtattatccagttgaatatcattcacccggaaattttgcggtatcgagagatatttgcctttaattaccccatagccgattaacatcccggcgctattaatcatttcaatattatcaatcacgaaattgtcacaaccgtaaatagcgactgtcgcgttatcaatgcccgctttcttactgaaatccggcgtgatattgcgggctttgatattacgaataacaaaatgtttaccattttcaacatgtatcaactgccgacaatccgatcccgtgatattcgccacgacaaagtttttcactgcctggtcttccgggtagttgttatcataagtgcttcccgcaaggcctatgccgatgccccagttgattttgccgttggtacagttgatgcgctcgatgacatggtcagatatcaaaatatcacggtcgttaattgccacgttccattcaatggcgtcgccttgtaagtcgctgaacttacaattggtgatgttggcaccgataatctggttatgaaatccctggcgtaagatggcgtaattagcgtggctaacggtcaggttatcgatgatcaggttgcgcatgacccgtttgtttttgccgccgatataaatctgcgtcaccgggccaaagccgctcatagtcagccctttgatggtgcagtcagaaccacgcacatccagggtgatgttatgcatactgccgccatcctcccctgtcacctggctgccgtcctgtaagacaaatcgccctctgccgttgccgcgcaagcttccaagaatgtgtaacgttttaccgggagggataaagatgccggtgttgatattgtcacaaaccaatccggcaggcacgacgactgtttgcccttcgctgaaggcttgtttaaatgaggcgatccagtcgtgtgggttgtagtcgttaatgttaacgctttgtcgggcgggaagcgcgcgggcgaaaggggtatggaggaaggcaagcgccgagcttgccgtcaggaacgtgcgtcgggagagttttttaaatggcatgcgttctcctctataaagcctgcagcaagctggcgagttctcgattgatcacctgctggttaaaatcgtgttcaactttttcgcgcgcgcgtttgacgaccggagccaattcgtcggtgtccagttggctaaacgccgccagtcgttgcgccagtgcgcgagcatcgttctcaggcaccagccagccggatttgtcagcctccaccagttccggtattccactatgcagagtagaaaccaccggaataccgaccgccatcgcttccattagcgccaccggaataccttccatatcaccatccgcacctgtaaccgatggcaacaggaagacatccgcgtcgtcgagcatcgctttcacttcatggctcggtttaaagcccggcatctccaccacatcttccagttgatattgttcgatgagggtgcgcaggcgtctttcccacgggccaatgccgaggatgcgatagcgaaatgccacgccctgctctttcaactgacggcaggcttcgatcgccacatgcaggccttttttctcggttaagcgtgcgacggaaataatctccagcggcgttgcgggcgctttcacgggacgcgggctaaagcgcgtcatatctacgcccatgcgcgatacggcgattttttccctcgggcagcccattttttgcagccttccggcccacagatcgcttatcggtaacatcaggtcgccacggcgaaacagttgctgatattcgggagtgtagtggttgagcacttcccgactggagatatcaataccgtggaagatagtggcaattttgccgcgaatgacacccagttcgcggagttttgctgcggttacccccgcgggaccaaaatgagcgatgaacacatcggcgcgaaacggtgttgcgacctggccgcaaatggcagacaaaatcaggttccgcgactcggcaccatagcgtttgaggttgagcgcctgccaggtatttttacgatgaatgccgcgcaaggtctggctggctcggtggcgcagtttcgccactttgcccgtaggttcgtcctgtaaccagcgggttctggcagcaaggttgtatttcgtccatgccgcgtgggtgttttgtgtgtcgcctttttgcagcgcgagaatctctacctcaaatcccatatcaataaacgcggtaatttggttaaggacgaaggtttctgacgacagcgggaatttcagtaaaaagaagccgaccttcatttcacctccccgatgcgctcaagcacagactgcaccatctgcattcctgtctgacgctcacgactgacggcttcactaagtcgcgcattcagcgccggaagctggcctaaggtatccgcaaccatcgcttgcaggctgccgtctaataaatgacggatatcaattgccatctccggtagtcccagctgctgcataatcccggcggatttatgttcgtagttgatggcaattgccggagtggcaaaattcatcgagataatggcagagtgcaggcgcgtaccgacggtgagttcacaggcccccagaattttgcccatttccagatcgttgagttcatccatcactacgtggtaacgggcaggatcgctgatgtgctggcgcaggttgagcgccaccatgcggtcgtctttgttatagctgtcaatgcccgtacaggtggagagcgcaatcacctgatacccttcatcgagaatgcgattgaccaccccggcaaaggctttttcatacgcttgttgagtggtgccgagacgtttgtcaaacggtgccagttcgcgcagggtaatggccaccgttttctgttgtgcggcaacgtccagccagtgttgaacggcatagctggcggtgaagtcttctgtgtggtgatcgaccagccacgcggtatcgacgccatgttccacttttgcggtggtgatattgctgcgtttcatcagatcaaagctgaccgattcgcgcaggatcagcgcgtcgcagtgaccaaaaacgtagttcgccagttggttaaattgctcatcctggaacgggccaacactgtgaccaatcataaacagcggctttttcgccataaacgtgcaaagtgcatgttcaaactgcggcacgccatagagatcgacaaaaaacgatccgccgacctggataatggcgtcgtaacctgacagcaggcgcacgaagtcggtgaatccctgggcgatggcgatattgcgcagcttgccagtgtcggtgacgcgtgagagcaatacctgatgctggtagcggcgacggaggacttttttaacgcgcccgacaacgcccgccgcgctgttgtgttgtttcatttgcaggaacagcggatcgcccattaccgggcggttgagcagccaggaagaactgaccggatagcggctcatcacatccacttcggcgtgtggattgagaatgttgatggcatcaagtaagccgcgcaggatggcgctgtcgccacgattgccgcaagtgtggttgcccagaataagtaatttcattttttcctcataaatttgatgccaggtgaggctgcgtttgttttgttcgttgccgctttttgcctgatgcgacgctgacgcgtcttatcaggcctacaagacccgagcacagaaccgtaggacggataaggcgttcacgccgcatccggcattcagtgcctgatgcgacgctgacgcgtcttatcaggcctacaggtcccgagcacagaaccgtaggacggataaggcgttttacgccgcatccggcaaccgttgtcggaaccgaaaacagcaactcaccccgcccgtaaaagcattttcattttttcgctgcgacaaaactgacgcttcacttccaccaccagcggatggcgcgacagcacaatcatcaccacaaacgccagcacccccgtggctatttgcaccgccagcagcatccccagcgccagttgccctttcagcacaatgcccagcgcataactgaccaccagcgtcggcagcgagagataaaacggcagccataaactcaggatgtactggcgataactggaaccaagaaccggtttaatcatcacgaagtaactcagaatggtgttgataatttgcaccagcaggaagccaagcgtgacgccgatcgcgcccgccatctgcccacctataacaatcgccggaataaacagaaatgttttgaatacgttgaatttaaagctgatatcgacccgcgctttcgccatcagcagcgaaccaatcgggttacctacggagcgcagcagacccaccacacacagcaattgcagcaccggaataatgctgttccacttctcaccaaagaccagcggtacaaagttattcgacaccaccattagcccgagcagcgccggaaagttgataatccccactaccgacagcagcttgtagaagttaacacgcagcttttcggtatcgtcctgaattttggcgaatgccggaaacaacacgcgggtgatgattgggttcagcttcatcggtggcacaacggccacgttgtacgccaggttgtatccccctgccacgcccgcgccgagaatacgcgccagcacgagcgttgaaaggttggtattgagatagttgatgatgctgtccgccgtcagccaggcaccaaagcgtaagttcggtgccaccgacgccagcgagaaatgcagaccggggcgataaattttgcggccaaagtagccaaacagcagcgttctcaccgcactattgaccagataaccgaggatcgcggtcatcgccagcggccagaaatgggcgctaaccaccgtacaagtgaagcccgccagcaccgcgctggtttcgatcatgccgattttgttgaactccagctctttttgcatcaacgcgcggaactgttgcccgtgggggattaccacaaacgccagcgataatgttttaatcaacggtgccaggtccgggttattcagcacgtcgccgatgagatcactcaacaaaaacaccgccacgcacaccacgatccccagcccgacgttcagccagtacaacgtggtgagttcaaggtgactgatttcttttcgctgaataatcgagttagcgataccgaagtcagaaagcgtatctgccagcgcgataatcaccagcgacacggtaagcaggccgaactggtggttgtcgataatccgcgccagcacggtcatctgcaccagcccgaggccgatgatgatcaccgtggcaatcgccgaccacttcgcgccgctgatggttttttcacgtaagctcatatcaatatgccgctttgttaacgaaacctttgaacaccgtcaggaaaacgattttgatatcgaaccagacgctccattcgcggatgtactcaaggtcgaactcgacgcgtttttccattttctccagcgtgtcggtttcgccgcgccagccgttaatctgcgcccagccggtaatgcccggtttcaccttatggcgcagcatgtagccttcaatgagctgtcgatactgttcgttatgcgctactgcgtgcggacgtggaccgacaatcgacatccccccggtcagcacattgataaactgcggcaattcatccagcgaggtacggcgcagaaagttccccactttggtgacgcgcggatcgttctgcgtcgcctgggtcaccactttgtcgttctccatcactttcatggaacggaacttccacactttgatcggcttgccatccatgccgtagcgagtctggcggaaaataaccggccctggtgaactgagtttcaccgccagcgcaatacagcacagcaccggggagatcagcagcagaataagcgtcgccagcacaatgtcttccgcacgtttgagcaggcggttaaccccggaaagcggcgtgtcgtaaagcggcaccaccggtacgccgttcatctcttcgaggcgtgaatggagaatgttgaaggtaaagacgtcggggatcagcagcaccgaacaggtggtgtccgccagttgatggaccagttttttcactcgcgcgccgtcgcacatttgcatcgcgatatagacgttatgaatcttgcccgctttcgcgtcctcgaccagctgttgcaggttacccgcccagtcgttagaaacgccgcccggtttcgggtcgtggtaaacgcccaccacttcaaaccctaaccacggctggttacggaagctctccatcagcatttgcccggcggctaaatcccccgccaccgcgaccatgcgcttgttatagccatgattacgcagccagcccgccccaatgcgaatacacgaacggcaaaccaccagtccgatgctggtcagcgcataccacgccagccagattttcagttgcgtgtcgaaatcattgttgaacgccaccagtccggcgctgaaaatcacgcttaaggtccagttttgtagcaacagggcaaattctgtcgctgcccgaacaccgcgccatgagcgataaaaatcggtgatgccgcccagcatctggaacaccaccagcgtaatcagcgccaccaacaggtgcatgtagaggaatgacagtccgctgacttcgcaaaccagccatagtccggcaaacatgatggtgatatctgaaaagcgttgcaccatagagattaacgatgcattggttttcgctcgctcgcgcttttttagatttgtcatcgttgttcctgttattagccccttacccgcagtggggtaagggaagatccgacattactcgttcagcaacgtcagcagagttcgcgttcgcgcttccatcagcggcacatcaccgcgcgattccacattcaggcgcaccaccggttcggtattggaggtgcgcaggttaaagcgccagtcggcaaaggtcatgctgatgccatcggtgcgatccaccgccagcgcctcacggctaaaatgctgttccacgcggttaatcgcctcaacgggttgcgccagtttgctgttgatctcaccgcttgccggaaacgccgccatccggtcgcgtaccagttcgcccagcgttttatctttcaggcacaccagttcggcgaccagcagccacgggatcatgccgctgtcgcagtaagcgaaatcacggaagtaatggtgggcgctcatttcgccaccatagatggcgtcttccttgcgcatacgttctttaataaaggcgtgtccggttttcgacattaccggcgtgccacctgcggcagtcaccacatcaacggtgttccaggagagacgtggatcgtggatgatcttcgcgccgggatttttttcgaggaatgcttctgccaacaggccgacaatgtagtagccctcaataaactgccctttttcgtcaaacaggaaacagcggtcaaaatcgccatcaaaagcaatgcccatatccgcgccgtgtttgatgaccgcattgcgggtgtcgtcgcggcattccggcagtagtgggttaggaataccgttggggaaattgccgtccggcgtgttgtgcactttgattaattccacgggcgcgccgagggctttaaagcgggcttcaatggcgtccaccaccggacccgctgcgccgttcccggagttgatcaccagcttgagcggcgtgaggtttttgacattgatataaccgaacaggtgatcaacgtaagcgtcacgcaggttgatttgctgatagcgaccgcgtttggtttcatcgacgggaggaaagtcgttggcttcagccagacgctggacgtcgcgcagtccggtatctccgctgatcgggcgagccccctcgcgaaccagcttcatgccgttataatccatcggattatggctggcggtaacttcaatgccgccatccacgccgagatggaacgtggcgaaatagatctcttcggtgccggacataccaatatccagcacgtcaacgcccgcatcctgtaaacctttcgccagcgccagttttaaggtttcgctggtgaggcggacatcaccgcctaacacaatggttttcggtttgagaaattcgccataggcgcgaccaatgcgccaggcgatatcttcattcagttcttcgcctaatttcccgcgaatatcataggctttaaagcaggttaattttttcatatcgttaccctttttcaggcaatagttggccctgaccgaagcggccaattttatttttgtcgttatttacaccgcggtttcgcattcattgcctgatgcgacgtttacacccgtccgtagcgatccgcgaaacgcaccacatcatcctcttcgagataagagccggagcgcacttcaattaaatcgagcggaattttccccgggttttccaggcaatgcgtcgcccccagcggaatataaatggactcgttttcaccaagcagtttgatatcaccatcaatggtgacttttgccgttcccgcgacaaccacccagtgttccgcgcggtgatggtgcatctgtaccgacaagccctcgcccggtttcacggtgatgcgtttcacctggtagcggtcgcccgcgtcgatagagtcatatttgccccacggacgatacacttcgcgatgcacccgatgctcatggcgaccatcggctttgatctgctcgaccacttttttcacatcctgtaccgcgttacggtcggcaatcagcaccgcatctttggtctgcaccactaccagatctttcaccccgacggtggtgaccaggccagattcagcatacacatagctgttttcagttttgtgattaatcacatcgccgtggcaaacgttgccctcggcggtgtgggcgctgatctcccataatgaagaccaggagccaacatcgctccagcccgcatccatcggcaccacaacagcatctgccgtacgttccatgaccgcgtaatccaccgactcttccgggcaggcgagaaacgcttcttcatccacgcgaataaaattgagatccggatcgacggcgctcatcgctttttcacaggcatcgaggatatccgggcgatattttttcagttcttcgagatagcgtccggcgcggaacaggaacataccgctgttccagtaatattcgccgcttgccacataggcctgagcggtttccagattcggtttttcgacaaactgcgccacttcaaaggccaccatatcctgctcacccgcagacacttcaccgcgacgaatatagccataaccggtttctggtagatccggcacaatgccgaaggtcaccagcttgcccgcttcggcatatggcatggcattacgcacggcggcacggaacgcgtcttcatcggcaatcacatgatccgccgccaataccagcattaacgggtcgctctccgggctatgacgttttgccgccagcgccgccagcgcaatggcaggtgccgtgtttcgccctgccggttcgagaataatgttctcggtaagtttgttcagttgacgcagctgttccgcgacaataaagcggtgctgctcattgcaaatcaccaccgggctttcgcactccacgccgttcaggcggcagatggtggtttgcagcatggtgagatcgcctttcaggcataaaaactgcttgggataaagtacgcgggaaagcggccataagcggctaccggagccacctgccatcacaactggatagagtttcgactgcgccataattatccccgaatatcatttataaattgacgtaacacgttctctttatcgagcgtgcgttcggcatattcacgtgccaccgtgttgtgtttgggcagcaggagcgcctgacggatccccgccaccagcgcctcgaccgattccggttcaacgcaaaccgcaatgcccggaaaggtttcgcaaagctgccccagttctgtgtaggcttcagcagtaatcaccgcgttaccgcctactgccagaatattggtcagtttcgacggcaatacggcatctgccgcgccgcgtttttgcaccaccagatggcaatcgcccatcttcagcagtgcgggtaaagcgtcatacgattgcagcgggaaaaattgcatgttgcgcagtccacgctgctgcgccattttttccagccgcgctttgccgccgccctgcccgacaatggcaaaaatcagcggttcatcgcgcagacgatcggcagcttcaataacgttttccagcccctgcttttcaccaatattgccggagtaaagaatgatttttttgttatccggcaggtcaagctggttacgaagggcatcaacatcggcatctgcaacatgctgaaaacgggcaatttccgaccagttggggaagaagatgacgttttccgccgccacgcctttttcgatggctttattcatcatcgaacgcgaaatcgtggagacgttatcgacgttatgcagtccgctacgttcgaacgccgttgccagctgtgccactttgccgcctttgccttttccggcaaggcccagccccagcatggcgtccacttcgtaatcctgaatatgcagcacggtacgcgcaccagagagtttcgccagcaggcgcattcccggcgcgcaaaacagcgttggcaccacgccaataatgcgatccggcttccagcgacgttgcgccatcagcggaaagaaactgctgacggcaaaactgcccagatgcaacaggcgtttcagggtgctcggctgttttggcacatacagcgggcagcgccacaccgtggcggccccctcttctcgtttgtagcgccaggcggaatagttctcgcccacctgccattgcgggtagtaaggcggtgcggtaatgacccgcacctcatgaccttgtgccgccagccattccaccatctcgccggtgtatttgccgatgccggttaactccggcgagtagttaatgccgtagaccagtattttcataatccgggtactccggtacgcttctcagcgagaaaataggcgcggctgttagcatgaacattatcactggcgagcagcgcgtccgacgtcagccagcggtaatcgtcatgctgctcatccggcagtaacagctcttcttccgatactctgaagcgaaaaccgagcaccacatagtgagtggtgaaatccgtgccagagaagttatcgtcataaaagtgctgccagacaccgtaaaactggcctgctgttatcggcaaacgcagccccagttccgccatcgtcagccgctcaaatgcggcttccagcgtttcgtctttctgcacgcgccctcccggcacaaaccagtaaccctgcgccgggcggttggttcttttgccaagcagaaactcgccgcgactgttctcgacaataaagtcgagagagacaagcggagtggagcgcactaccgtggcaaagtcttcctgacgtaaaaacatcattacccccgaaagcggtcttgattctcaaggaaccactggtaagtgctggcaagccccgcttccagtgagatttcgtgataccagccaagctgatgcaggcgcgtcacatccagcagtttgcgcggcgtgccatccggtttgctggcatcaaaaaccacccggcctttgtaacccaccactttggcgatggtttgcgccagctcgcggatagtgcagtcaacgcccgtgccgacgttaatgtgcgacaacatcggctgggtgttctccagccagacttcatgcgccagctccatgacatgaatgctcgccgccgccatatcatcgacgtgcagaaattcgcgcatcggtgtaccgctgccccataccaccacgtccggcgcattctgtgccgtcgcctcgtggaagcgacgcagcaatgctgggatcacatgcgaattactcgggtggaagttgtcgtgtggcccgtacaggttggtcggcatgactgagcggtaatcgcgtccgtactggcggttgtatgattcgcacagtttgatcccggcgattttggcaatagcataaggctcgttagtcggctccagcgtgccctgcaacaactcgctttctgccatcggctgttttgccagtttcgggtagatgcaggacgatccgagaaacagcagtttgttcacgtcgttctgatgcgcggcgtgaatgatgttgctctcaatcatcatgttctggtagatgaaatccgccggataggtgttgttggcaacaatgccgcccactttcgccgccgccagatagacctggtcaatacgttcgctggcaaagaaatcatgcacggcgcggctgtccagcaggttcagctcgtcgcgggtgcgtaataccagttccacatcaccgcgctgttcgagctgccgcctgatggcggaaccgaccatcccgcgatgaccagcaataaaaactcgttgtttactcatgcttatgactccagcgcgatcgccacgtcgtagccgtgagatttcagcagagagtgttttttcgccgcttcgaggtcattagccaccatttcagacaccatctctctgagggtgatttccggtttccagcccagtttttcgtgcgctttggtcgggtcgccgagcagcgtttcaacttcagccggacggaagtaacgcgggtcaacagcgataatcacatcacccggtttaacgcccggcgcgtcatgcccggtgacggaaaccacaatgcccttctcttcaacgcccgtgccttcaaagcgcagtttgatgcccagctgtgctgccgccatttccacgaactgacgcacggagtactgaacgccggtcgcgataacgaaatcttccggctgttcctgctgcagcatcatccactgcatttttacgtagtctttggcgtggccccagtcacgcagggaatccatattgccgaggtacaggcacgactccagcccctgggcgatgttggcgattgcgcgggtgattttgcgggtaacgaaggtttcgccgcggcgcggggattcatggttgaagagaattccgttacaggcgtacatgccgtaggattcacggtagttaacggtgatccagtaggcgtacagtttggcgaccgcatacggagatcgcgggtagaacggcgtggtctctttctgcggaatttcctgcaccagaccatacagttcagaggtggaagcctgatagaaacgagttttcttttccagaccgaggaagcggatcgcctccagcaggcgcagcgtacccatcgcgtcgacgtcagcggtatattctggtgactcaaaagagaccgcaacgtggctcattgcgcccaggttgtacacttcatccggctgtacttcacgcaaaatgcgcgtcaggttagaggtatcactcaggtcgccataatgcagatggaatttcgggttgcaggtgtgcggatcctgataaatgtgatccacgcgctcggtgttgaatgacgatgcgcgacgcttaataccatgcacctcgtaacctttttccagcagaaactctgccaggtaagaaccgtcttgtccggttacaccggtgatgagagcgacttttgacatgtattattcctctgtatttttgaatttattcagtttcaacgcgttcgcgtatcaccactgcgggattcccccggcaaaccacatttgccggaagcgatttaaaaacactgcttcgtgcacccacgacggtgccgtcgccgattgtgacgcctggggcaacaaagacatcggttgccagccagcatttctcgccaatcacaataggcgtggcgttaatggtgaaatgttgacttgcatggtcgtggctaccggtgcataaataacttttttgcgatatcaccgaatgtgcgccaatggttatttcaccgagggtatataaattgacgtcatcgccgacccacgcgtaatcacctaaggttaatttccacggataggtaatttttactgacggacgaataactacgttttttcctatttttgctccgaataaacgtaataaaaaagcccgccagcgatacaatacttgtggcgaccaggcaaatattgttgcctgtactgcccaccataattgcactttaatagcgttgccgccccggaaccctttcggcaccgagaaaccgcttaaatcttgcattggttttccttatattcagactttgttatataaggctttcgtctttgaggtagtacgttggcgtaaatgccaggataattcagcccaaaagccaggcacatgtaatatttgtcgttggacttttttcgcgtcagcacacaattccatattattggtggtagataccccacccatggaaaattcagacaccaggccattgagttttttaaatgcataaccggctttatacattttggctgccagcgcgtagtcggaagaaactttatattccaggtcataacgccattttttcaagccggatacagggaaaaatatcgcctgatgactggcgggcaggctgtgataaatataccagcccggtttggcgctacgtttaattttatgcccgtcgccaaaatccagcagcgcatcgccggtgatcatcacgttatctttttgcatttttaacttacggacaaaatttgcggcattctgatgaaaaatatcgcccgaattgagaaacaacgcgaacttgccttgtgccatcgcaatgcctttgttcatggcgtcgtagataccgttatctggctcgctgacaaagcgtaggttaaagataccattgagattttccagatactcacgggtgccgtcgttggaaccgccatcgacaacaatccattcgaagctgatatcttccacctgcgccagatgcgccagcgaggcatgtgttttgactatcccttcgaggttacgaaacgcgacagtgattatgctaagcaacatgttcttattcttacctcgtaatatttaacgcttttcgcaaaataaacggacagacgattaaaaatgcatattccgggctaaatatcgaaccggtaaaaaacagcgataccggagtaaaaagatataattgcacgcgaaaattgcggttatcaccaaaagcgttgatcatcatttttatcactttccccatgtaccacagtgataaaaacaccgcgaaccaggaaaaataaataatcagcagatacaaaccattgtctatggtttttccgacatccgcaccgttaaatattccgaatgatgcgacatattcataaagtgagccaaatctgactacaccgtcaatatgggtcaaagaataaccgaccatcaccagcggaccgacaatacgataatatgatgacgatccttccgtacctaaatcgcccagacgggtggaaatataaggaaacgcgattaccacaccaaccaggaatacagccagagaaatcaatgctaacggtaactttttcttaatcgcctctttattcagatattgaaatgcccactccagcaaataaaacaggataaaggtcataacccctgaaaacgatccggataatattatccctgcgagaatcatagcatctgttttaggcgttttgataccaaactgtttgatgctgagccaaattgagattaatgccagagcgaaaaatgccggttcgaaataaagtgctgtcgtgcgcttgccgccgaatttaatgaaattcagcacatagctgttgctgtaaatcagatatttcgaaatcgactccataatactgctgccaccggtgaggataatttgtgccatctccaccgccgccagcgccaccaccagcccgaccaccagataaaagaaacgtaatatcttgcgatggttgtgtggcgaaattgttttaaaacgaatactccacaccatgccaataatgatcacaatatagacaaacagcatagttgaagtgacgtatttactggcatccagcgactgaccaaacagatagttaaacgccgtgagtcccgcgccaatccctaaggcaatcatcaattttttaacgctgatgcgttctaaaaacagcagtaacaagacaggtaaaaaagtgacgatggtgatggggaaactttcgccaagctgggcgattttgacgttaaccagcagataaatcagcggcagcaacaggtagctacagattctgatagaagttgacatactcctccagcatctgttgtccactgtaggcggcgcggctgcgttggctgaactcagccagcgtggtaccaaatatcgcctgcgcgatttccggtttgcttaactgcaccagttgcagcacctcttcttcgctgacggttttaccgccggatttttgcaacacttcccgcgccgcatcgctatgggtggcaatcaccggcacgccaatcgatagcgcctcacacaaaatcagcgggtagttatcgacgcgagaactgaataccagcgcatccatctgattgagcgcgctcatcagcttacgtttgtcggtttcaaagccgtgattaaccacgttgccagcggtgaacggcgagaacttaccaaaggtatgcagttcaattttgtcgcccagcgccatcatctcgcgtaccagttgctggttagttttgccgtcgtaacgcagatcatgcgccaccaccgcgattttcggcttgccctgggtttcgcgcaccggaggcaagtccgccagaatcgcttcagttgccatatcaatgccattattgataatccggcaacgccctggaccgtacaggctattgaaagcgtcagccacatgctggctgggggaaataaactgacagcccagcgccagcatctcacggaataactggcgtttgcccgccaccagttggtgtgcgcgatcaatcttcaccggcggatagttatttaaggtcgggcatttctggcagcctgttttccagccttcgcaaccgtcggtaaaggcgcagcgtccggtaacactccagtggtcgtgcagcgtccagaccagagtgacgtccggtttatggtttttcactttttcgcaaaagcgcaccacgctcttaagatttagccagtagctgtgcagcacatgaaaatgcaggaccaccggacccgctgtgcgagtaatggtgcgatataactcattgaaattgccaaacagatcgcgattaaacagacgaaacagagcaatattcgccatcgcggtcatccgcggcgtatgtttgatgacctgcggatagttctgatggctgacgctctctttgccgcctttgccgtaaccgtagacaaaatgtgacgccagcccctgttgcagcgcacgctggtggagatctaacgccacacctgctgccccgccttccgccagtcgcacattaaattgcaaaatattcatttaattaccttcactcgcgctttttctcccaccaccagcgcgttgtccgggacagagtcgagcaccacgctgcccgcgcccacggtgacgttgttaccaagcgtgatatcaccaagaataatgacgttggcaccgagttcgacgccgttgccaatgtgtggacatgccatgttatcggcaccacgattgccgatagtgacgccgtggcgaatggtaaaatcatcccccgctaccacgtttttattgatcacgacggcgtaaccgtgatggatagtaaagcggcggccaatggtcgcggcagcctggatttcataaccgaaaaagcattcggtgataatgcgatacagcaccagcagcggggccgcccacagattgttgaggacgttctttttgcgccacaccgaacaaaaatgagcaacacgataggcaagaaccatgcagcacgggcgtaaactccagctgttggcgcgcagatcttccagcatctttagcgcccccgaataccatcagccagacgtttgccgttacgcaccgacagcagcgtcagcaaagtgcgccaggtcatacgtttattgcggatctggtagagggtaaacagctgatattttttgctggcgcggtcgaatttgtctttgtgcttgcggtaaaagtggaagtacccggagaattttttcggtgacgaggtgatctgcatttcaccgtgattgatatgcaggatctgcgtcgcctcttctactttccacggttcgccgtactccaccaccatccgcaggaagatgtcgtaatcctgtgccgctttcagttcggtatcgaacaaacactctttgaaacgccatgcccaggtaaagacctggttgccaatgatattgcgtttgtagaacaggcggcgtgaatacggcgatttgggatacagcggcaagcttgccggttgggaatagacttcgccctggcaaacgtagtcgttagcgtacaaaaaggcgtgtgtgaccagttgctgtttatgggcgaggaagacgctcagacggttgggtgtccattcgtcatcgtcatcaatcccggtgatatattccccttgcgccagcataatcgcctggttacgtaccgcgcacgccccgctgttaatgtcgttgtgaatgtaagtgatacgcggatcgttgagggcggtgacgtactgttgcagttgttcccaggaggtggagcaatcatccacgatgatcatctcccagttgctgtagtcctggcgcaaaaccgattttattgcccgaatcgccagttgttggcggttccaggtcggcatatagattgagatcagcggattgtttttcataggttgttctcccggcttatgagctggtttgcttgccggatgcggcgtgaacgccttatccggcctacggggcggtgcgaatgcaggcgtcgttatttcgcatccgacttatattcgtattcgtaatagccataatcctgatacgcgctggcgcggcggaagatggagttcagaatcacccctttcaccggaataccgttttgctcaaagcggctcagactggtttccacttctttcaatgtgttgaccgcataacgcgccaccattaacgtggttccgacatgacgaccaacaattgccgcatcggtcactgccagaatcggcggcgtatcaatcaacaccaggtcatagtttttactcgcccagttcaccagttcggcaaagcgttcgctcatcaacagttcagaaggatttggcggcacctgaccgcgcgggatcaggtcaaatttggcaatagaggtcggtttagcagcggtagtaatatcgccctgaccaatcagaatttccgacaggccattaacgttattagtgcccaacagctcgtgggtgtagcctttgcgcatatcgcagtcgatcaacaacacgcgtttattggtctggctgatcaccgccgccaggttggcgcagacaaaggttttaccaattgacgggctaaccccggtcatcatcaacacattgttctgtgcctgcatcatcgcgaagtgcaaactggtacgcagactacggatggcttcaatcgccagatcggttggattccccaccgccagtagctggctctgtttatagcgtttaatccctttgatggttttgacgctatcacgcgctttctgccattccgacagcgggatgctggcatagacgctaataccgtgttcttccagtacttgcgggctttcaatgccgcgattaaacaacgagcgcagcagcacacccacgatagaaagcatcaggccaaggataatcgcgccgaggataatcagccctttcttcggtttcagcacgccaggctgagtgattgccgggtcaacaatgcgcacatcgccgacggtgctggcctcggtgattttcagctcctgctctttattcagcagttgcatatagacctgctgaccagactcgacatcgcgggtcagacggacaatctcctgctgggttttcggcatcgccgttacgcgaccgttaagtttggctttttcgtcttccagcgcctgacgtttctccagcagcgtgcggtacgccgggtgaactttggtgtacagcttggagatttccgcctctttaaaggtcagttcgttcaactgcgcatcgatgttcaccatcgaatcgagcaccgcttttgcttccagcggcagatcaacagaatctttatcctgacggaaggcattcagtttgttttcggcaacatccaagcggctacgtacttccggtaactgttgcgcgaggaaggcgaggcttttcgacgcttccgccgatttgcgctcaatattttgttcctgatagttacgggcgatgctgttaagaatgtcgcggatctgttcacgatcttcaccggtataagtcaggctcaaaacgccagcgtctttgccgttctccgttaccgtcaggctgttttgcagttggttgatcatccccagcgtggagtatttggtgacggtaaactcactgcccgggctggcgtgaatggcttcaaccatcagcgtgacgccttcttttttcagcatctggcccgcttgcccccgggcgctaaagccgccgtcgctgctcagggtgtagtttttgttgtccagcacattaagcgtaaacacctgatccgccatctctttcgggcggttaaaggtggtcactttcaccgtctcgttctgacgtcccatcaggcgatcccagcccgcaccgaaaatcgggaacgtgtttttgctcactgcaatatcgaggtcgagatcgtccaccgttttaccaagcaccagacgcgaacgaatcaactggatctcggcgtccgatgcaggcggtttgttggctaatgccgaaccaatgtcctgcactaacgaattgccgctgttttgctcgatttgtaccagtgcgtcggcactataaatcggcgtggcgaagaaggtgtaaaccacggcacagagggcgaatacggtggtgatgccaatcacccaccagcgcgcttcaatgacggtgccgaccaggcgaccaatatcgatttcatcactgcccgttaccggagcggcatgttgttttactttttctgtcattcttatacctgctctgcgttcaatgcctgcgcccactggcgggcagaccgttcaagtaatgtgtacaccgctgcaaacgtttcccggcttttgcgatacggatcggggatttcacattcgttatcccagtgaccaaacagcatcactttgccgcgcatctccggtgccatctcgcataagcgttcgatatggcgcttttccatggtcaaaatcaggtcgtagttgcgacacagacggcggctgatttgacgggcacagtgaccttccagagacagttgatgttctgcggcgacgctgatagcggtaggatcagcgcccttaccgaccagcgcgccgagtccagcggactccactttcagctccgggtgataacgttgcagtaagcgttccgccgtcggggaacggcaaatattgccgacacagacaactaagatgttgttaaacatgacgattaccagttatgaatgtcgctggctgtatccgtcatgtaacggacaccgctaatagttggcagcaactgattgatcagacggttccagcgggaaaccggggcggtggtgacatacaccacgtcataaggttgcaggcggaattctgtcgccatcaccagcgacgtggcatcggacatatccagctggtagatattggcaatcttgccgttacgcccgccctcgcctttcagcggacgaatgacaaagatgccgctggcgttggaggtggtcatgtcgatgccttcagcattgcccagggcttcagtcagggtcatgccgctaaagtccattttcagggtgctctgtttcttcacttcacccatcacaaatactttcagatcatcattacgtggcacgtagagaatatcgccggggtaaagcaggcgattctggttgaggtcgccgttttgcatcagcgcctgcaaagaaatgcgctcttcacgaccattgtgtgttagcaccacgttgcgccagtcagcggtgtcggtcaggccacctgcggcgttgatggcgtcgagaatagtcagtggcacgttggtgatcgcctgttgaccggatttattcacctgaccggagatataggccttttgtgagcggaaggcggcgatattaacgtccacctgcgggtcagcgatgtacgtcgctaagcgcccggtaatatcactgcggatttcagcgagcgttttcccgactacgtggaccttgccgatatacgggtaaaacatagtgccgtcaggctgtacccagttgccggtgtcgctggagctgcggtactgaccggctggcgtggtgagttccgggtgatcccagacggtgacattaagaacgtcccccggcccgacgcgatactggtaattcgcgatctcactttccagcgtcatattggggcgcgctacattcgggcgtgggcgtaattggtcaatcaggcgcggggtcagcggataaacattcaccattttgtcgagatcgaaatcagcgtcctgctgtttgatgacgtctttgcccatcgtcgacatattgctgcccggaagtactgtgcaaccgcttatcaaggttactgacaccaataatggcatcaatttcattttggatttcatcattgtttatttatcactttggcagagtaattatcctgtgcactattaatagcaatgtcgccatgcacatttaccttgcagttaattgaataaaaatttaactggcatcagtcctaaaaaaattgatttcatccgcaggctattgacagaataattcagactggtctttcaggcatccagacacgctaccgcccctggctttttagctaccaatacactgatttagtttaatttttcacaccctctcagcatgcagtcgttgatgagaaagggttattacggaaattaacttccgaatataaggtgacattatggtaattgaatattggctttccaataatgcaggaggaagtgttacagctaacggaatagcaggcaagataacaattcggtaattggctatttttaagaattatattaagtgtcattcaatatggtttttaggagtttctttaggttgacaatatttaatatagtgtctccacatgcgatatttcttaaataatgttttattattaccacttttaattcagggataatgtgaggttattaccctcaaataatatgagataaatagtgctgcaacattgcatttttgccccgatttatccatgatcgaattgtgacatttgtcatacaacgaataggttttgtacttactatggaatggattgccgatccgtctatctgggccgggttaatcacgctgattgtgatcgaactggtcctcggcattgataacctggtctttattgccatcctcgccgaaaaactaccgccgaagcagcgtgaccgcgcacgggttaccgggctgctgctggcaatgttaatgcgcctgttactgctggcgtcaatctcctggctggtcaccctgactcaaccgctgttcagcttccgctcgtttacctttagcgcccgcgacttaatcatgctgtttggtggtttcttcctgttgttcaaagccacgatggagctgaacgaacggctggaagggaaagacagcaataatcccacacaacgcaaaggtgcgaagttctggggcgtggtgacgcaaattgtggtactggacgccattttctcactcgactcagtgattaccgccgtcgggatggtcgaccatttactggtcatgatggccgccgtggttatcgctatcagcctgatgttgatggccagcaagccgttaacgcaatttgttaacagtcacccgacgatcgttattctctgcttaagcttcctgttgatgattggctttagcctggtggcagaaggtttcggcttcgtcattccgaaaggctacctgtacgctgccattggtttctcggtgatgatcgaggcgctcaatcagttggctatctttaaccggcgacgttttctttccgctaaccagacgctgcgccagcggactaccgaagcggtaatgcgcctgcttagcgggcaaaaagaagatgcggaactggacgccgaaaccgcgtccatgctggtggatcatggtaaccagcagatctttaatccgcaggaacggcggatgattgagcgggtacttaatcttaaccagcgtaccgtcagcagcattatgacgtcgcgccacgatattgagcatatcgatctcaacgcgccggaagaagaaatccgccagttgctggagcgaaatcagcatacgcggctggtggttaccgacggtgatgacgcagaagatttgctcggtgttgttcacgttatcgacctgctacaacagtctctgcgcggcgaaccgctcaacctgcgggtgttgattcgccagccgctggtgttcccggaaaccttgccgttgttacctgccctggagcagttccgtaatgcccgcacgcactttgcttttgtggtggatgagtttggctcggtggaagggattgtgacattaagtgacgtcactgaaaccattgccggtaacttaccgaacgaagtggaagagatcgacgcccgccatgatattcagaagaatgcggacggttcctggacggcgaatggtcatatgccgctggaggatctggtgcaatatgtgccgctgccgctggatgaaaaacgtgaatatcacaccattgccgggctgttgatggagtatttgcagcgtattccaaaacctggcgaagaagttcaggtgggggattatttgcttaaaacgttgcaggtagaaagccatcgcgtgcagaaggtgcagattataccgctgcgtaaggatggcgagatggagtacgaggtgtgatggtatcggtcattttacccaatagccgaaaggaataagatgagggaaccgcgccatcggcgatttaccgccgggagcccgggttgccagggtggtggagattgagccaccctggcacgttcaccggcttgagcgttccatagtagcgaggaacatcaagtgaacggaacagccttcgatcttacatattcagaatataatgatgccgccacgaacgcctgatgcgacgctttacgcgtcttatcaggcctacaggactggtcacctggtaacctacatcttctccagcaacttcttcacatctttgccattacgggaatctttattccgctcggcccagtcattcaggcgacgtttcgcttcgtcctgtagatgtttgcgcagtaactgatccacttgcaggctgtaattgagttgctgccagttgccataaacccgcagcggtactggcgtttctttcaggaaatcaatcagtttgctttccccgttccagccacccacgacccgaatatcaaactgggtgtcgcaggtttgatctgccagattcaacatgccttcccctgtcagcgccagcacaggcgattgaccttgcatgtcgtttaacgtcacgacgccatccttcaacgtcaaatcggtggtaaagcggtcaagccgcgtcacgttatcaaagttttcagcggccttcacatcaccgccattacgctctaccgcttgctgaatcatctgctggaagttcatcccttccatgcgcgtgtcggtcatttcgacatgtgcctgtccttgccagttgtggcggaatgcgtcggcatctatgtcagcaccggagaaatcaccagccagtgacatttttccggtcaacgaaatcggatagttaaacgccttcagaatggtaccaatctcaacgttttccagccgtggctggaagtttatccgcggatttattgatgtcgcgtccagcgtgcccggcagtgaaacctgtccaccgttaagtttgccctgcagttgagtaatttccagcaaacccgacttgttggtcatttgcgtggcaacatctgtaaaattcattccgcgccagcgcacgttactggcctgcaacaaaatatcagccgtaaagccttgcagtccctgataggccggttcatcaatacgcgaagaaatgaccgggcgcggcaacgttgattggctctgcccctgctgcgcggcaccgttttcaccattcgcggtttcattaagcgggatgaggttgtcaagattcagttgcgggaattgcagcctcagctgccattccggtttctctgtcagcgtaacctgtgcttgcccgcttagcgtactatcattggcggtcaaactaatttggttaaatgaaaggcgtttatgtgactcctgccactgggcctggaaactcccctgcccctgaataccttgttttggtaaatcggcaccctgcaactgccagttaatttgttcaatagccgccgttaaatcatgcggataatcagaagcatctaccgtaccgttaagggatatcgtgagatcgcgctgatcgcgattaacccgcccggagaactcaaatgaaccacgatgttggggatcttgttccatttgcaggcgaatattgcggattgtcacctgctcgtcatcttcatgctggaacaccagcacgctgtccgccaccttaagactggatatatcaaacgaccatccgcgatcgtctgacagatccggcaaggtattgtcgcgcggtgcaaccggagcgtcttcactgcgcaccgcttccgtctgcggcgtcagttggatcactgccccttttagcatcacctgcttaacgctcagttgatgactcagtagtggtaaaagcgccacgtccagacgcatgttgtcggcgcgaaccagtggctggcttgcgccctgggcggtgagagacattcgcccggagaggatactaagctgcggccagacgtgccaacgcagtggcccgtcgagctgcaattgataaccgctacgtgcagcaacttgcttgaccatatagtcgcggaaatcattcggattcaccagcaacactaacgcagataacccggccaccagcacgaccaggagtatcatcagcgtcgtcagaaatcgtctcatggtatcctcaatgggcctgaattagtctttatcgattcggctggctaccgcgccctgctggttgcgatatttcgcatcttcacggcggttgtaaggtcgcaccgccgggccggaaagcggctcaaagctcagcgcaccaattaacatgcccggacgcagcgccagcggcagcttaccggagttgtagaactccagcacaatgcaaccagaccagcccggatcgatgcggtgcgcggtgacgtgcaccatcagccccagacgcgccagtgaggaacgcccgtccagccagcccaccagatcggctggcagcgtcaccgactccagcgtcaccgccagcgccagctctcctgggtgaagatagaacgcctcgccctcgtcgagaacgatctcatcgctcatcacgcggtcaagcgcggcgctcacttcatctttgggaccgctcagatcgataaacgctgccgtgtgaccacggaaggtacgaaatttattgcccaggcgtacatccaccgtcgcgccgttaatacgctccactggcggacgtgggttgatcgacaaacggccttcatcaagccaggcttcaatatctcggtcacacagacgcatggcattttctcctttcgcgcatcactcccttaacgccaattacgtcaagggcatactaggttatcactgaacggtacacaatttatcaagcttattcaaagaactgacttattttcgctttcaatatatcgatcgcgatgcggtttttcccgccgcgcggcacgataatgtccgcatattgtttagaaggctcaatgaattgcaggaacatcgggcgcacggttttttgatattgcgccatcactgaatccattgaacgcccacgctcgttaacgtcacgcttgatgcggcgcatcaggcagatatccagcggggtatcaacgaaaatggagaagttaagttcgtcacgcaaacgcgcatccgtcagcaacaaaatgccttcgagaatgatgaccttcttcggctcaaccgtcaccgtttctttcatacgcgtatgttcaacatagctgtaaaccggcaggtcaattgccgagccgcgtttcaacgcttgtaaatgctcaagcagcagactgtgatccatcgcgctgggatggtcgtagttggtcttaacgcgttcttccatcgacagatggctttgatctttgtaatagcagtcttcgggaattacgccgatgtgttcatcaccgacttgctcacgcaattcacgataaagggtactggcaataagactcttgccggaagccgatgcgccagcgataccgataatgacgcactgatgagactgatcagtcatatatttagcgacctgattaacctggatgttaggaagggggcgacgaagcgccaaacgcggcaattatagggatttcatccgtctgataccagtcgaatagcgttgccgcgcgctcagagttaattgttgacaaagaattcccgggggcaaattacgttgatcagttttatgtaaggtaaaaaatgttaaacgcagttgcgcaaattatccgcctttacgtcactttatgagcaattcgcatataaaatgtaaaacttttgtactagcataaacacagaaacgaatactggcgaccaggtcttgcggataaagcggtaatgagcaaacaatcacagcatgtattaattgccctgccccacccgctgcttcacctggtcagtttaggtttagtctcgtttatctttacccttttctcgcttgagctttcgcagtttggcacccaactcgccccactgtggttcccgacgtccatcatgatggtggcgttttatcgccatgccgggcgcatgtggccgggaattgcgctgagctgttcgctgggaaatatcgccgcatccatcctgcttttttccaccagctcgctgaacatgacctggacgaccatcaatattgttgaagccgtggtcggggcagtgctgctacgtaaattgctgccgtggtataaccccttgcaaaatctggctgactggctgcgtctggcactcggcagcgccattgttccgcctctgttggggggtgttctggttgtcctgctgacgcccggagacgatcctctcagggcatttttgatatgggtactgtcagaatccatcggcgctctggcactggtgccgctgggattgttatttaaaccacactatctgctgcgccatcgcaacccacggttgctttttgagtcgctgctcacgttagccatcacactgacgttaagctggctttcgatgctgtatctgccgtggccttttactttcattattgtgctgttgatgtggagcgccgtgcgtctgccacgaatggaagcctttttgatcttccttaccacggtgatgatggtgtcgctgatgatggccgcggatccctccctgcttgctacgccgcgtacgtacctgatgagccatatgccgtggctaccgtttttgctgatcctgctgcccgccaacatcatgaccatggtgatgtatgcctttcgtgcggaacgcaaacacatttccgaaagcgaaacccactttcggaacgcgatggaatattccgctatcggtatggcgttagtgggcaccgagggacaatggctgcaaaccaacaaagcgctctgccagtttctcgggtacagtcaggaagagctgcgcggactcacctttcagcaactgacctggccggaggatctcaataaagatctccaacaggttgaaaagctgataagcggtgaaataaacacctattcaatggaaaaacgctactacaaccgcaatggcgatgttgtctgggcgttgcttgccgtctcactggtgcgccacacggatggcacgccgctctattttatcgctcagattgaagacattaacgagctaaaacgcaccgaacaggtcaatcagcaactgatggagcgcatcactctggctaacgaagcgggcgggattggcatctgggagtgggagttgaagccgaatatttttagctgggataagcggatgttcgagctgtatgaaattcctccacatatcaaaccgaactggcaggtgtggtacgagtgcgtgctgccggaagatcgccagcatgccgaaaaagtgattcgtgattcgttgcaatcacgctcgccctttaaactggaatttcgcattaccgtaaaagacggtattcgccatatccgcgccctcgccaaccgggtactgaataaagaaggcgaagtcgaacgtctcctcggcatcaatatggatatgaccgaagtgaaacagcttaacgaggcattgtttcaggaaaaagagcgcctgcacattacgcttgattccatcggtgaagccgtggtctgtattgatatggcgatgaaaattacctttatgaatccagtggcggagaagatgagcggctggacgcaggaagaagcgttaggtgttccgctcctgacggtgttgcatattacttttggcgacaacggaccattaatggagaacatttacagtgccgacacctcacgttccgcgatcgagcaagatgtggtgttgcactgtcggagcggcggcagttacgacgtgcattacagtattacgccgttaagtactctggacggcagcaatattggttcggttctggtgattcaggacgttaccgaatcacgcaaaatgctgcgccagctgagctacagcgcctcccatgatgcactgacgcatctcgccaaccgcgccagttttgagaaacaactgcgtatcctgctgcaaacggtaaacagtacacatcagcgacatgccctggtgtttatcgatcttgatcgctttaaagcggtgaatgacagcgccgggcatgcggcgggtgacgctttgctgcgcgaactggcgtcgttaatgctgagtatgctgcgttccagcgacgtgctggcgcgactcggtggggatgaatttggtctgctgctaccagactgtaatgttgaaagcgcgcgttttatcgctacacgcattatcagtgccgtgaatgactatcactttatatgggaaggccgtgtgcatcgggtaggtgccagtgccgggattaccttgattgatgacaacaatcatcaggcggcagaagtgatgtcgcaggctgatatcgcctgttatgcctccaaaaatggtggccggggccgggtgacggtttacgaaccgcagcaagctgccgcacatagcgaacgggcggcgatgtcgcttgatgaacagtggcggatgattaaagagaatcagttgatgatgctcgcccacggtgtcgcttcgccacggatcccggaagcgcgtaatttgtggctgatttcacttaagctctggagttgcgaaggcgagattattgatgaacaaacatttcgtcgtagcttcagcgatccggcgcttagccatgctcttgaccgccgggtattccacgaatttttccagcaggccgcaaaagcggttgccagtaaaggcataagcatctccctccccctttccgttgccggtttgagtagcgccacgctggtgaatgatctgcttgagcagctggaaaatagccctctaccaccacggttattacatctgattattccggctgaagcgattttagatcacgcagaaagcgtgcaaaaactgcggctggcgggatgtcggatagtgctcagccaggtgggccgcgatctgcaaatcttcaactcgctgaaagcgaatatggcagattacctgctacttgatggtgagttatgcgccaacgtgcagggtaatttgatggatgagatgctgattacgattattcaggggcacgctcagcgactcgggatgaaaaccatcgccgggccagtcgttttacccttagtgatggatacgctttctggcatcggcgtcgatctgatttatggtgaggtgattgccgatgcccaaccgctggatttgctggtgaatagtagttatttcgcgattaactgaggcgtgcttccccatcgcctgatgcgacgctaacgcgtcttatcatgcctacaaatcgctcattccccaggccggataaggcgctcgcaccgcatccggcgaccaacgtcatgcttcgtctggttgccagccttccgtataccagatatgcaacagcgcataagaacgccagggcttccagcgctcggcataacggcggatttgcgccggtgtcattcccggaaatcgctgtttaatcagataatcatccggcaggaaaacatctttcgcctgccagccacgcaaagcaaaataattcgccgtccagcgcccgatacccggaaaagtttgcagcgttttcatcgcctgctccacatcgcccggtattgtcattggtaaggtgccctccagcgccgcatttgccagatgaatcagcgcctctgcccgtttcaacggcatacctaacgcttttaatgcctgcgggtctgctgctgccagccgctgaggcgtcgggaagcagatatactccggaaaatcatccagccgttcgccataaagctgtgccactctggcggtcaattttgccgccatcgccacgctcaccagttggcctaaaatcgcccgcacgccctgctcaaaagcatcaacacagccgggtaaacgcaatccgggccgcgccgcgcctaacctgcccaacgcaccgttaacaatttgtgggttacattgcagatcaaacaggcggctcattttcgccagacactctgcggcaacaggttctaaacctgcacttaaatttatgtgcagagtatggcgggctatatccggaatagcagtcaccacgccgcgatattcgcccaccgccagactacgggcataataactgtccgcgaccgtttccacactgctcaccgcacgggcggcgagaaatcccaacatccacgaccagtcatacggcggctgccagttcagggtatacatcgcatctccttattcatccgctttcagcataaacgttattcagacgctgcgctttgctttcatattccggttgtcgcgacggcaacatttcgctaaagtcacgccccttcttcaccggcatggggattatttcgtgtttattggttttgattacggtacagcaaactgttcagtggcggtcatgcgtgacggtaaaccgcatttgctaaaaatggaaaacgacagcacgctgctgccttcaatgctttgcgcgccaacgcgtgaagcggtaagcgaatggctgtaccgccatcatgatgttccggcagacgacgatgaaacgcaggcgctgttacgtcgggcgattcgttataaccgcgaagaagatatcgatgttacggcgaaaagcgtgcagttcggtctttcctcactggcacagtacattgatgatccagaagaagtgtggtttgtgaaatcaccaaaatcgttcctcggtgccagcggcttaaaaccgcagcaggtagcgctgtttgaggatctggtctgcgcaatgatgttgcacattcgccagcaggcgcaggcacagctgccagaagcgattactcaggcggtgattggtcgtccgatcaacttccaggggctgggcggtgatgaagcaaacacccaggcgcaagggattctggaacgcgcggcgaagcgtgccggattcagggacgtggtattccagtacgagccggtcgcggctgggctggattacgaagccaccttgcaggaagaaaaacgggtgctggtggtggatatcggcggtggtacgactgactgttcattgctgctgatggggccgcagtggcgttcgcgtctcgatcgtgaagccagcctgctgggtcacagtggttgccgtattggcggtaacgatctggatatcgcgctggcgtttaaaaacctgatgccactgctgggtatgggtggcgaaaccgaaaaaggcatcgccctgccgatcctgccgtggtggaatgcggttgccatcaacgacgtacctgcgcagagtgatttctacagtagtgccaacggtcgtctgcttaacgatctggtacgcgatgcccgcgaaccggaaaaagtggccctgttacagaaagtctggcgtcagcgtttaagctatcgcctggtgcgtagcgcagaagagtgcaaaattgctctttcaagcgtagcggaaacccgcgcctcactgccgtttatcagcaatgaactggctacgctgattagccagcgagggctggaaagcgccctcagccagccactgacgcggattctggaacaggtgcaactggccctggataacgcccaggaaaaaccggacgttatctacctgaccggcggtagcgcccgttctccgctgattaaaaaagcgctggcagaacagttgccgggcattccgattgcaggcggcgatgactttggctccgtcaccgccgggctggcacgctgggcggaagtggtgtttcgttaattgaaaaatggctcagcagcggcttaaatctgcctgcgcctgagccagtttttctgctgcctgacgtaacggttccatcaacggcatggtccgtgctggagcatgaaggcggaatcgctgcaactctgtcgcgccgactgtcaacgccgattccagccgatgtcgtttggcggtcattttcgccattaccgcttgtctgtctgctggcgttatcgcttcattcggcctgaacacaaaacggcgttcacagctcgctttccagtcgataaccgcctgggtcagatggtcgccaaaccctttcacttgcttaacgccacgacgggtaacatctgcggctgtttcaataccaaaagaccgtaacgccgctttacgcgcagggccaacgccgggaatagaggcaacatcaataaaaaatccctccagaaacttctgcttctgccgttcccttgcagtgtcatgaagtgctgccagagcgcgtttctcttcttccggtaacccgagaatttcgtccttcattttttcgagcatcgtccgtttggcgataaaaccttccaggccgcctacctgctggatctggcggactaaatggtcatagtccattttcgcacgattaaatgcctcacggcgttgctgaacttctgctttgtacgctttgcttgtcagactgccaataatccagatagccgccagcacaggaaccaaaataatataacgcggttctgcctgaaggccgcaaagcagcagcgataatgctgacagtgcgatctcaagcagaatgatgtattcgcgccgtaacaggcctaaaggaagcggcctgccagtcggttggaaatgatcgggtaatggcagttgcaatgctggcggtgctactgacgccatcaccatcgcccagactttcgccagcacaaaattcccgccggtggtaatgacctcttcgccgagatcaataaaatagataacaccttgattatccagcgcacaccacgggcagtcagtcaaatgagcggggtaaacatgcattgctgaaacgatacatttctttaactgttggcgtagagagtccagtgccgctacccacgctttagccgtcggacgcccggttgccacgccactttccgtgaatgcctgctgaaacatggcttcaacatcactcggtaacatcgatagcggaatagatcgtggcggcggttttaaaccacgtcgctgattatctgacgcgtaggcataacggaaatgggtaatatccgtctccagcgcattacccgcatcagagataagcggcacaccagaataaggatgccgcccaccaaacaagacgtgaaaaattagcaacgcaaggccaaaattatcgtgattttctgtgcgttcaaaaccgacaaatgatggcaaggtttgtagctctggcggcgtaaaatgcgacacgccgacttcgcataaatgcagtgtgccattggcgttaatttgaaaggagtcgctatcaatcagtaccactttgctgtcgcgacctaccataaaactgttctggtttacgtcacccacgacgtgcccgtgctcgtgaaccgtagcaaaagatgaagcaatattgcgcgcaacatagagtagaaaatcccacgcacaatgagggtaactctggcgacgatgtgccgggctatagatcatatgaatcggttctttaccagaaacttttggcatcataaaaccgataacttttccgcctcgtccaccgtgaagcgttgcctgcggccaggcgacataattcaacaactgcgcgtcagctgtcgcagccataaaggcaagtttgtcctgttttaaggcgggtggcggcgtgtgataaatcttggcgacgctatcgacaaactcctcgatatcataaaccgcgccttcaccacctttgcccagttcacggccaagagtggtcaattcacctgtcgatgtaaatacttttatatttgttttcataatatttcgcgggtagttatattatatttcaatgaataataacaactaaccattaaaattatttctatatggggaaaacccactcaagaataaaaatgataatgcaattttatcaggatacaattcaatttcggcctgataatgattaacttccacaggtttttgctaactttgactacaaagggattctggagaaaaaatgaaaaagatattacttatgttgagtctgctattttttactaccgcgggctttagtgaagtttcggatacgttagtgacgggaggttatgataaacaagcgatgtctgacgcgattaaacatgcgcggaaagaaaccgataaattcatcgaggttatgaataaaaaagatgccgatactttcgcagtcaaagccccgataaccgatcacggaagaaccgagcatttctggcttacggatgtcacttattctaacggcatgtttattggcgtaatcagcaatgaccctggtattgttacaaacgtagaatatggccaggagtggaaaatcaagaaagaagatatttcagactggatgtatacgcgcggggataaaatttacggcggttataccattgatcctttattggtcacctatccaaaagaagaagccgacgagctaagagcaaaattagttcgctaatcagccgttatatttattgtttaaactggcggttgaattgttgtcttcaaccgccatgagaaactcactctgcccacagcgccagtgccaacgttttatcatcatccgtacgctcgtttaccgccgggctggacaaaaactgctttaacaattcaggtaataaatcgagttgttcctgcgttgctgccgccagtccattgaaaaacggggtaaagaaaggcacatgaggagaattatccagcatatttaacgccagtcgctggataccatccgtaaatgctgcaactttgtgcgcacgcccagtgctggtgaaagtttccagtctggaaacggcatcttcgtcggtaatgaagtgcgtcatgttggcatattcacccgccatcggcgtgagaggcaattgcagaccgtgacccaaatctaccaccacgccgccatcgccaatctgcataatcaaggtgccgtcaggcgatgaaatcagtcccagaaatgtgcaggcaaaatcgcgaaccgctaattctttggcttccgcctcggcaaaaagtcgttgacgaatggtcagtaccatatttgtggcgaggacatcattaagccccaattccccgccctgcactttttgcgacatataagccatcgcttcattgacggcgagcatcgcgccttcgccaccctgcgagacactgcctgcgccatcagcgacaaataccgacaataatggctgctggtcatttaaccaggcaatctgcatctggcaggcatcctgacaaggcaagtccgcgctgatgtgcgacgttccaacggttgatgcatagaccagacgccagctcacactgacgtccagccttttggcgcttccagcacaacttccgttcccggcgtggagcgggaaaccgaacgcagcgaactggataaccagctaaacagttcacggaattgtaatccttgcagaggcaaaggctgacgaacgctaatttgtgccagcgtcttcatatccgccccctgaacaccgatggaaaagaaagcaaaccttttatcttcttccccccgaaacactttgttggctgcagcctgccactcatcggttggtgcaccatcggtaatcaggaaaatccacgggcgataatacgaaataccatttgcacgatactcacgtttccgctcctctaccatatccagggctttggtaatggccgcacccattggtgtatcgccctgggcaaacaggatgggcggaaaaaaattagcggcgctggtaaagggttgttccacatgcaccgggccgaacgtcacaatgccgagttccactctttttaaagccagcggatcagcaagcagttcatcacgaaaggtaaccaatccggcgttaagttcattaataggtctaccgttcatagaaccagaaacatccagcagcaaaatgcaggggcaacgtggttccgggttactggcaaaatcgctggtggcaaacgtgatttgttcgctcataagaaatcctttcttagagaattatcgaggtccggtatcataccgactgcaataatgaaataagagcaaacgaagaaactttcagaattaggcccggcggcgcagaaaattttgctattcgcctcgcaagaacggagagccgtcgattgacactaagggcggagtgacataatttcaggagtgagggttagggagaggtttccccctccccctggtgttcttagtaagcctggaagctaatcactaagagtatcaccagtatgatgacgtgcttcatcataaccctttccttattaaaagccctcttctccgggagaggctttcccgtttcagcgtcccgctgaaatcatcggcttacctcctttcgccctgaatgcagtctatcgctaacgcgtgaataaaatagtttcctctgtgattattgcgtaacgactcgcaaagaatatttgctggcaggatcgcagactacaaagcctgcggattgacaatcttatcgtgaaggcatactttcaggagtgagggtagagcggggtttcccccgccctggtagtcttagtaagcggggaagcttatgactaagagcaccacgatgatgagtagcttcatcatgaccctttccttatttatggccccttcctcgggaggggctttcccgtttcagcgtcccgctgaaatcgtcggcttacctcctttcgccatgcaagcagtctatcgctaacgcgtagataaaatagtttcctgtgttattactggatgcgtgctcgcaaatgtgcccgtcattcagacgattccagacagtgtttcataattcctccatttttctcccttattggctggctacactagtatcattccgcgaaacgtttcaggaagagaaactcttaacgatgaaaggtagttataaatcccgttgggtaatcgtaatcgtggtggttatcgccgccatcgccgcattctggttctggcaaggccgcaatgactcccggagtgcagccccaggggcgacgaaacaagcgcagcaatcgccagcgggtggtcgacgtggtatgcgttccggcccattagccccggttcaggcggcgaccgccgtagaacaggcagttccgcgttacctcaccgggcttggcaccattaccgccgctaataccgttacggtgcgcagccgcgtggacggccaactgatagcgttacatttccaggaaggccagcaggtcaaagcaggcgatttactggcagaaattgaccccagccagttcaaagttgcattagcacaagcccagggccaactggcaaaagataaagccacgcttgccaacgcccgccgtgacctggcgcgttatcaacaactggcaaaaaccaatctcgtttcccgccaggagctggatgcccaacaggcgctggtcagtgaaaccgaaggcaccattaaggctgatgaagcaagcgttgccagcgcgcagctgcaactcgactggagccggattaccgcaccagtcgatggtcgcgttggtctcaagcaggttgatgttggtaaccaaatctccagtggtgataccaccgggatcgtggtgatcacccagacgcatcctatcgatttagtctttaccctgccggaaagcgatatcgctaccgtagtgcaggcgcagaaagccggaaaaccgctggtggtagaagcctgggatcgcaccaactcgaagaaattaagtgaaggcacgctgttaagtctagataaccaaatcgatgccactaccggtacgattaaagtgaaagcacgctttaataatcaggatgatgcgctgtttcccaatcagtttgttaacgcgcgcatgttagtcgacaccgaacaaaacgccgtagtgatcccaacagccgccctgcaaatgggcaatgaaggccattttgtctgggtgctgaatagcgaaaacaaggtcagcaaacatctggtgacgccgggcattcaggacagtcagaaagtggtgatccgtgcaggtatttctgcgggcgatcgcgtggtgacagacggcattgatcgcctgaccgaaggggcgaaagtggaagtggtggaagcccagagcgccactactccggaagagaaagccaccagccgcgaatacgcgaaaaaaggagcacgctcctgatgcaggtgttacccccgagcagcacaggcggcccgtcgcgcctgtttattatgcgtcctgtggccaccacgctgctgatggtggcgatcttactcgccgggattatcggttatcgcgccctgcccgtttcggcgctgccggaagtggactatccgaccattcaggtggtcacgctctacccaggtgccagcccggatgtcatgacctctgccgttaccgcgccgctagaacgccagttcgggcagatgtctggcctgaaacagatgtcgtcgcaaagttccggcggtgcgtcagttatcactttgcagttccagctaacattaccgctcgatgtcgccgagcaggaagtgcaggccgcgattaacgctgcgaccaacttgttgccgagcgatctgcctaacccgccggtttacagcaaagtgaacccggcagatccgccgatcatgacgctcgccgtcacctcaaccgccatgccgatgacgcaagtggaagatatggtggaaacccgcgtcgcgcagaaaatctcgcagatttccggcgtcggcctggtgacgctttccggcggtcagcgtccggctgttcgcgtcaaacttaacgctcaggcgattgccgccctcggcctgaccagcgaaaccgtgcgcaccgccattaccggcgctaacgttaactcggcaaaaggtagcctcgacggcccttcccgtgcggtcacgctttccgcgaacgaccagatgcaatccgccgaagagtatcgccagctaatcatcgcctaccagaacggcgcgccaattcgtctgggcgatgtcgcaactgtagagcaaggtgcagaaaacagctggctcggcgcgtgggcgaacaaagaacaggccattgtgatgaatgttcagcgccagcccggtgctaacattatctccaccgccgacagcattcggcagatgctgccacagctcactgagagtctgccgaaatcggtgaaggtgacagtgctttccgatcgcaccaccaatatccgcgcatccgtcgatgatactcagtttgaattgatgatggctatcgcgctggtagtcatgattatctacctgtttttgcgcaatattccggcgaccatcattcccggtgttgctgtaccgctgtcgttaatcggcactttcgcggttatggtgtttctcgatttttcaatcaataacctgacactgatggcgttaactatcgccaccggattcgtggtcgatgacgccatcgtggtgatcgaaaacatttcccgctatatcgaaaaaggcgaaaaaccgttggcggcggcgctcaagggcgcaggtgaaatcggctttaccattatctcgctgaccttctcactgattgcggtgttgatcccactgctgtttatgggcgatatcgtcgggcgactgttccgcgaatttgctattaccctggcggtagcgattttgatctcagcggtggtgtcgctgaccctgacaccgatgatgtgcgcgcggatgctcagccaggagtcgttgcgtaaacagaaccgcttctcccgtgcctcggaaaaaatgttcgacaggataatcgccgcctatggtcgtggactggcgaaagtgctgaatcatccgtggctgaccttaagcgtggcactcagcacgctgctgcttagcgtgctgctgtgggtgttcattccgaaaggtttcttcccggtacaggacaatggcattattcagggcactttgcaggcaccgcaatccagctcctttgccaatatggcccagcgacaacgccaggtcgcggacgtgattttgcaggatccggcagtgcaaagcctgacctcatttgttggcgttgatggcactaacccgtcgctgaacagtgcacgtttacaaatcaacctcaaaccgttggatgaacgtgatgatcgggtgcaaaaagtcatcgcccgtctgcaaacggcggtagataaagtgccgggcgtcgatctcttcctgcaaccaacgcaggatctgactattgatactcaggtcagccgcacccagtaccagtttaccttgcaggccacgtcactggatgcgctcagtacctgggtgccacagttgatggaaaaactccagcaactgccacagctttctgatgtctccagcgactggcaggacaaagggctggtggcgtatgtcaatgttgatcgcgacagcgccagccgtctggggatcagcatggcggatgtcgataacgccctgtacaacgcgtttggtcagcggctgatttccactatttatactcaggccaaccagtatcgcgtggtgctggagcacaacaccgaaaataccccaggcctcgcggcgctggataccattcgcctgaccagcagcgacggcggcgtggtgccgctaagctcaattgccaaaattgagcagcgttttgcgccgctctccatcaaccatctggatcagttcccggtaacgaccatctcctttaacgtgccggataactattcgctgggcgatgcggtgcaggcgattatggacaccgaaaagacgctgaatctgccggtggatatcaccacgcagttccagggcagcaccctcgccttccagtcggcgctgggcagcactgtctggctgattgtcgcggcggtggtggcgatgtatatcgtgctcggcattctgtacgagagctttattcacccgatcaccattctctcgacgctacccaccgcaggggttggcgcactgctggcgttgctgattgctggtagcgaactggatgtgattgcgattatcggcattattttgctgatcggtatcgtgaagaagaacgccatcatgatgatcgacttcgcgctggctgctgagcgcgagcaaggcatgtcgccgcgcgaggcaatctaccaggcttgtctgttgcgttttcgtccgatcctgatgaccactctggcggctctgcttggcgcgctgccgctgatgttgagtaccggggtcggcgcggaactgcgtcgtccgttaggtatcggcatggtcggcggtctgattgtcagccaggtgctgacgctgtttaccacgccggtgatttatttgctgttcgaccgcctggcattgtggaccaaaagccgctttgcccgtcatgaagaggaggcgtaagtgaagttttttgccctcttcatttaccgcccggtggcgacgattttactgtcggttgccattaccctgtgcggcatactgggcttccgtatgctgccggtcgccccgctgccgcaggtcgattttccggtgattatcgtcagcgcctcgctgcccggtgcgtcaccagaaacaatggcgtcttccgttgccacgccgctggagcgctcacttgggcgcattgccggagtcagtgaaatgacctccagcagttcgctcggcagcacgcgtattattttgcagtttgattttgaccgggatatcaacggcgcagcgcgtgatgtgcaggcggcgatcaacgctgcacaaagtttgctgcccagtgggatgcccagccgcccgacctatcgcaaagcgaacccgtcggatgcgccaattatgatcctcacgctgacgtccgatacttattcgcagggtgaactgtacgatttcgcctcgacgcagctggctccgacgatttcgcaaatcgacggtgttggtgatgtcgatgtcggaggcagctcactgcccgccgtacgcgtcgggctgaatccgcaggcgctgtttaatcagggcgtgtcgctggacgacgtacgcaccgccgtcagcaatgccaacgtgcgtaaaccgcagggcgcgctggaagatggcactcaccgctggcagatccagaccaatgatgagctaaaaaccgccgctgaatatcagccgttgattattcactacaacaacggcggcgcggttcgtctgggcgatgtggcgacggtgaccgactcagtgcaggatgtgcgcaacgccgggatgaccaacgccaaaccggctattttactgatgatccgcaaactgccggaagccaatattatccagacggttgacagcatccgggcaaaattaccggagttgcaggaaaccattccggcggcgattgatctgcaaattgcccaggatcgctcccccaccattcgcgcctcgctggaagaagtcgagcaaacgctgattatctcggtggcgctggtgattctggtggtgtttttattcctgcgctcgggtcgcgccactattattcccgccgtttcggtgccggtttcgctgattggtacgtttgcggcgatgtacctgtgcggattcagtctcaataacctttcgttaatggcgctcaccatcgctactggtttcgtggtggatgacgccatcgtggtgctggaaaacattgcacgtcatctggaagcgggaatgaaaccgttgcaagccgcactgcaaggtactcgcgaagtcggttttacggtgctgtcgatgagtctgtcactggtggcggtgttcctgccgctgctgttgatgggcggattgccgggccgactgttacgcgaatttgccgtgacgctttctgtcgccattggtatatcgttgctggtttctctgacattaacgccaatgatgtgtggctggatgctgaaagccagcaagccgcgcgagcaaaagcgactgcgtggttttggtcgcatgttggtagccctgcaacaaggctacggcaagtcactaaaatgggtgctcaatcatacccgtctggtgggcgtggtgctgcttggcaccattgcgctgaatatctggctgtatatctcgatcccgaaaaccttcttcccggagcaggacactggcgtgttgatgggcgggattcaggcggatcagagtatttcgtttcaggcgatgcgcggtaagttgcaggatttcatgaaaattatccgtgacgatccggcagtggataatgtcaccggctttacaggcggttcgcgagtgaacagcgggatgatgtttatcaccctcaagccacgcgacgaacgcagcgaaacggcgcagcaaattatcgaccgtctgcgcgtaaaactggcgaaagaaccgggggcgaatctgttcctgatggcggtacaggatattcgcgttggtgggcgtcagtcgaacgccagctaccagtacacgttgttatccgacgacctggcggcactgcgagaatgggagccgaaaatccgcaaaaaactggcgacgttgccggaactggcggacgtgaactccgatcagcaggataacggcgcggagatgaatctggtttacgaccgcgacaccatggcacggctgggaatcgacgtacaagccgccaacagtctgttaaataacgccttcggtcagcggcaaatctcgaccatttaccagccgatgaaccagtataaagtggtgatggaagtggatccgcgctatacccaggacatcagtgcgctggaaaaaatgttcgttatcaataacgaaggcaaagcgatcccgctgtcgtatttcgctaaatggcaaccggcgaatgccccactatcggtgaatcatcagggattatcggcggcctcgaccatttcgtttaacctgccgaccggaaaatcgctctcggacgccagtgcggcgatcgatcgcgcaatgacccagcttggtgtgccttcgacggtgcgcggcagttttgccggcacggcgcaggtgttccaggagacgatgaactcgcaggtgatcctgattatcgccgccatcgccacggtgtatatcgtgctgggtatcctttacgagagttacgtacatccgctgacgattctctccaccctgccctcggcgggcgttggagcgctgttggcgctggagctgttcaatgccccgttcagcctaatcgccctgatagggatcatgctattaatcggcatcgtgaagaaaaacgccattatgatggtcgattttgcgcttgaagcccaacggcacggtaacctgacgccgcaggaagctattttccaggcctgtctgctgcgttttcgcccgattatgatgactaccctggcggcgctgtttggtgcgctgccgctggtattgtcgggcggcgacggctcggagctgcggcaacccctggggatcaccattgtcggcggactggtaatgagccagctccttacgctgtataccacgccggtggtgtatctctttttcgaccgtctgcggctgcgtttttcgcgtaaacctaaacaaacggtaaccgagtaaatgacagatcttcccgacagcacccgttggcaattgtggattgtggctttcggcttctttatgcagtcgctggacaccaccatcgtaaacaccgcccttccctcaatggcgcaaagcctcggggaaagtccgttgcatatgcacatggtcattgtctcttatgtgctgaccgtggcggtgatgctgcccgccagcggctggctggcggacaaagtcggcgtgcgcaatattttctttaccgccatcgtgctgtttactctcggttcactgttttgcgcgctttccggcacgctgaacgaactgttgctggcacgcgcgttacagggcgttggcggcgcgatgatggtgccggtcggcagattgacggtgatgaaaatcgtaccgcgcgagcaatatatggcggcgatgacctttgtcacgttacccggtcaggtcggtccgctgctcggtccggcgctcggcggtctgctggtggagtacgcatcgtggcactggatctttttgatcaacattccggtggggattatcggtgcgatcgccacattgctgttaatgccgaactacaccatgcagacgcggcgctttgatctctccggatttttattgctggcggttggcatggcggtattaaccctggcgctggacggcagtaaaggtacaggtttatcgccgctgacgattgcaggcctggtcgcagttggcgtggtggcactggtgctttatctgctgcacgccagaaataacaaccgtgccctgttcagtctgaaactgttccgtactcgtaccttttcgctgggcctggcggggagctttgccggacgtattggcagtggcatgttgccctttatgacaccggttttcctgcaaattggcctcggtttctcgccgtttcatgccggactgatgatgatcccgatggtgcttggcagcatgggaatgaagcgaattgtggtacaggtggtgaatcgctttggttatcgtcgggtactggtagcgaccacgctgggtctgtcgctggtcaccctgttgtttatgactaccgccctgctgggctggtactacgttttgccgttcgtcctgtttttacaagggatggtcaactcgacgcgtttctcctccatgaacaccctgacgctgaaagatctcccggacaatctggcgagcagcggcaacagcctgctgtcgatgattatgcaattgtcgatgagtatcggcgtcactatcgccgggctgttgctgggactttttggttcacagcatgtcagcgtcgacagcggcaccacacaaaccgtctttatgtacacctggcttagcatggcgttgatcatcgcccttccggcgttcatctttgccagagtgccgaacgatacgcatcaaaatgtagctatttcgcggcgaaaaaggagcgcgcaatgaagttctggcgacccggtattaccggcaaactgtttctggcgattttcgccacctgcattgtcttgctgatcagtatgcactgggcggtgcgtatcagttttgagcgtggctttattgattacatcaagcatggtaatgaacagcgattacaactgttaagtgatgcgcttggcgagcagtatgcgcagcatggcaactggcgcttcctgcgcaacaatgatcgctttgtctttcagatcctgcgttcatttgaacacgataattcggaagataaacccggcccgggtatgccaccgcacggctggcgtacccagttctgggtggttgatcaaaacaacaaagtgctggttggtccgcgagcgccgattccacctgacggtacacggcgacccattctggtcaacggtgcggaagttggcgcggtgatcgcctcccccgttgagcggttaacgcgcaatactgatatcaatttcgataaacaacagcggcaaaccagctggttgattgtcgccctggcaacgttactcgcggcacttgccacttttctgctggcgcgcggtttactggcaccggtaaaacgacttgtcgatggcacgcacaaactggcggcgggcgatttcactacccgcgtaacgcccaccagtgaagatgaactgggcaaactggcgcaagacttcaaccagcttgccagcacactggagaaaaaccagcaaatgcggcgcgattttatggccgatatttctcacgaactgcgtacgccattagcggtgctgcgcggtgaactggaagccattcaggatggcgtgcgtaaattcacgccggagacggtggcgtctttacaggcggaggtcggtacactgaccaaactggttgacgatctccatcagttgtcgatgtctgatgaaggcgctctcgcctatcaaaaagcaccggtagatttgatcccactgctggaagtggcgggcggcgcatttcgcgaacgattcgccagtcgtggcctgaaactgcaattttccctgccagacagtattaccgtatttggcgatcgcgaccgtttaatgcagttattcaataacttactggaaaacagcctgcgctacactgacagcggcggcagcctgcaaatctctgccgggcagcgcgacaaaacggtgcgcctgacctttgccgacagtgcgccaggtgtcagtgacgatcagctacaaaaattgtttgaacgtttttatcgcaccgaaggttcccgcaaccgtgccagcggcggttccgggctggggctggcgatttgcctgaacattgttgaagcacataatggtcgcattattgctgcccattcgccttttggcggggtaagcattacagtagagttaccgctggaacgggatttacagagagaagtatgaccgagttaccaatcgacgaaaacacaccgcgtattttgatcgtggaagatgaaccgaagctggggcagttgctcattgattatctgcgtgctgcgagctatgcgccgacgcttatcagccacggcgatcaggtactgccgtatgtgcgccagacaccaccggatctgatcctgttagatctgatgctccctggcaccgatggcctgacgctgtgccgggaaattcgtcgtttttctgacattccgatcgtgatggtgacggcaaaaatcgaagagatcgatcgcctgctggggctggagattggcgcagatgattatatctgtaagccgtacagcccacgggaagtggtagcgcgcgtcaaaaccattttgcgccgttgcaaaccgcagcgcgagttgcagcaacaggatgctgaaagcccgttgattatcgacgaaggtcgttttcaggcttcatggcgcggtaaaatgcttgacctgacgcctgcggaatttcgtctgctgaaaacgctctctcacgaaccaggaaaagtgttctcccgcgagcaattgctcaatcatctttatgacgactaccgcgtagtaaccgaccgcaccatcgacagccacattaaaaacctgcgccgcaagctggaatctctcgacgccgaacagtcatttatccgcgccgtttatggcgtcggttaccgctgggaagccgacgcctgccgcatcgtttagttttagcgacattattttgttagccggagatggcgttcagaccagatccggcaacattatcccacgcatggtcagcaaactgacattatctctccgccctggcaggcatcagaaaatcgctcatactttaatcggtaaacagcacctttagatgctgttttcgatacacaatttcaatcaaggagtcattatggctggttggtttgaactcagtaagagcagtgataatcagttccggtttgtgctaaaagcgggcaatggtgagactatcctcaccagcgagctttatacctcaaaaacctctgcggaaaagggcatcgcgtcggtgcgtagcaacagcccgcaagaagaacgctatgagaaaaaaacggcaagtaacggcaaattctatttcaatctgaaagccgctaatcatcaaattatcggctccagccagatgtacgccaccgcgcaatctcgtgaaaccggaattgcctccgttaaagccaatggcacaagccagacggtgaaagacaatacgtaattacgatgccgggcgtgggttgttggcgtccggcgctttaccagagccccccacagcgctacaatgcccgcccttaaagtgggggcactcccctaaccgcttcatcaggtgaagcggatctgacctgtcatcagaacgagagaattatgtttaaaccggaactcctttccccggcgggaacgctgaaaaatatgcgttacgctttcgcttatggcgcagatgctgtttatgcgggccagccgcgttattccctgcgtgtgcgcaacaacgaattcaaccacgaaaatcttcagctcggcatcaatgaagcccacgcgctggggaaaaagttttatgtcgtggtcaacattgcaccgcacaacgccaagctgaaaacctttatccgtgacctgaaaccggtggtggaaatggggccggatgcgctgattatgtccgatccagggctgattatgctggtgcgtgagcacttccctgaaatgccgatccacctttcggtgcaggctaacgccgtgaactgggcgacggtgaaattctggcagcaaatgggcctgacccgcgtgatcctctctcgcgagctgtcgctggaagagattgaagagatccgcaatcaggtgccggatatggagatcgagatcttcgttcacggcgcgctgtgcatggcctactccggtcgctgcctgctctctggctatatcaacaagcgcgacccgaaccagggcacctgcaccaacgcctgccgctgggagtacaacgtccaggaagggaaagaagatgatgttggcaacatcgtacacaagtacgagccgattccggtgcaaaatgttgagccgacgctgggtatcggcgcaccaaccgacaaagtgtttatgatcgaagaggcccagcgtccgggcgagtatatgaccgcgtttgaagatgagcacggcacttacatcatgaactcgaaagatctgcgcgccatcgcccatgtagaacgcctgaccaaaatgggcgtgcattcgctgaaaatcgaaggtcgtaccaaatctttctactattgtgcacgcaccgcacaggtttaccgcaaagctatcgatgacgccgctgcgggaaaaccgttcgataccagcctgctggaaactctggaaggtctggcgcatcgtggctataccgaaggtttcctgcgtcgtcatactcacgacgattatcagaactacgaatacggttattcagtttctgaccgccagcagtttgttggtgagtttaccggtgagcgcaagggggacctcgcggcggtagcggtgaaaaataaattctccgttggcgacagccttgagctgatgacgccgcaaggcaacattaattttacccttgagcacatggaaaacgccaaaggcgaagctatgccgatagcaccaggcgatggttatactgtgtggctcccggtcccgcaggatcttgagctcaattacgcgctgctgatgcgtaatttctccggggaaaccacgcgtaatccccacggtaagtgattaatttcgattatttttcccggatggaaaattcttagaaaccgatcacatacagctgcatttattaaggttatcatccgtttcgctgaaaaacataacccataaaatgctagctgtaccaggaaccacctccttagcctgtgtaatctcccttacacgggcttattttttacgcgtaatacaatgaaataaaaggatttatttctggtcacgtccacacattgaccacatcgacaaaaaagcccctcgactgaggggcttcctgtttctaattacatccacataatttgctgccctgacggcaacgggtgcggccttacgacgtggacttctcccggcttcacaatgtatcgctgtaccgactcataagtgatgaacgtggcgctgcaattcacgttctgacactggtgataacgctcttttgtcgtgtcagtgatatagcggcttgtacgcgcatgtgcggcatgctggcataaaggacaatgaaacatcgcgagcacctcttccggttttgttgatggtgccattttagttaatttacccttacaaaacaaacagataaaataaaaacatcactcattatcttctgtttcgtaccccacatcagaaagcctgacctcaagctctaatgacgtcgtgaagccgctattattcagaaaatgtgtcaccttagtgattgtccagtcctgctcgtctatgacgcgcttaaagccagacactttgaccggtgtttccgtgtaaatatctgcccgaccggtagccaggctgatggagaactctgctacacgggcttatttttttatgcataagccctatctctggtaaccgtcttccattgaccacatcgatagaatcctccttcatagcacgatgcctttcacttatcggcatcgtgctcccacaggttccggctacgcacagccagaacgcgcatatttgacgcttaccaaaaaatattctcactctccacatttgaatgtcagacgagcgacaccatgtaatcctacaccttctgtcttcagctcaactatttgcatttttttgccctgagtaacacagaaatgagttgcatcattttttactatattttctgcaccagatattctacccctggctaaagaagcttcggcttcggtgtagtattggttatcgagtttacgctgaatattacttttatatgcaagaccaaatttaccgatacttgtctcatcattatgcacagcacaaccagacataataaaaatactaattaatgatatagcagctatctttttcatctcaccttcccccattaaataccaacgacactctctagtgtttaaatataataatggcatgattattataattgaataggattataataaatgttctgtacaacatttcctacataagtaggaattacggacattgaggcccttcagggtaactccatgggggctttaatatattatattgaagatgccactgtttagttgaatattaggtatatgctcttttttgaaatttatcggtggcagccgttagtattcgctgtccccattgcaagctcctggtggtaaccactgaatcctccatacttgaactgactttttatcctccgactttcatcctgttctgactccaccttttgttttctgctctacactatctacagaccaatcataaaggcacatacgatcatggcagaatttcccgccagcttactgattcttaatggcaaaagtactgacaatctacccttgcgcgaagcaattatgctgttgcgtgaggaaggaatgacgatccatgtgcgggtcacctgggagaaaggcgatgccgcacgatatgtagaggaggcccggaagtttggcgtcgcaacggtgattgccggtggtggcgatggcaccattaatgaagtttctacggcgttgattcagtgtgagggggatgacatacccgcgctgggaattttgccattaggaaccgccaatgattttgccaccagtgtagggattcctgaggcactggataaggcgctgaaactggcaattgccggtgacgccattgcgatagatatggcgcaggtcaacaaacaaacctgttttattaatatggcgacaggcggatttgggacgcgtattaccacagaaacgccggaaaaattaaaagccgcgctgggtagcgtctcttacatcattcatggcttaatgcgtatggatactctgcaaccggaccgttgtgaaatccgcggtgaaaactttcactggcaaggtgacgccctggtcattggtattggtaacgggcgtcaggccggtggcggtcagcaattgtgtccgaacgcgttaattaacgatggcttgctgcaactgcgcatttttaccggcgatgaaatacttccggctctcgtatcaaccttaaaatctgacgaagataacccgaatattatcgaaggcgcttcgtcgtggtttgatattcaggcaccacacgacatcacctttaatcttgatggcgaaccgttgagtgggcaaaattttcatattgaaatacttccggcagcgttgcgttgtcgattaccaccagattgtccactgttgcgttaatcaaactattctctcttgaaccagggagaatccgtaatgccggatgcggtgtaaacaccttatccggcatacagaacaatactacaccgtaattaattttacccgcgtcttctgcaatgccagtttatccacctctgacacagcatcatcggtaataataatgtcaattttttcgattggtagtacctgattaaaaccgcgacggttaaatttcgatgaatcgagaacggcaatcactttattagcggctgtgaccatcgcaccgctaatagaataaccttcattaaaggtcgtaataccattaaccgcatcaataccatcagcaccgacaaacattaaatcggcattaatatcctgtaatgaacgctcggcaatggaaccatgcatcgagcgcgttttatggcggaccgtgccaccacagacgaccagagtaatgtctttattttcggaaagggcaaacgctgccgggagactgttggtaatcaccgtgatatttttggcggtcattaatccttcggcgataagcattgtcgtacttccgctgtcgagaataacggtctgatcttacccagcaatagtggacacgcggctaagtgagtaaactctcagtcagaggtgactcacatgacaaaaacagtatcaaccagtaaaaaaccccgtaaacagcattcgcctgaatttcgcagtgaagccctgaagcttgctgaacgcatcggtgttactgccgcagcccgtgaactcagcctgtatgaatcacaactctacaactggcgcagtaaacagcaaaatcagcagacgtcttctgaacgtgaactggagatgtctaccgagattgcacgtctcaaacgccagctggcagaacgggatgaagagctggctatcctccaaaaggccgcgacatacttcgcgaagcgcctgaaatgaagtatgtctttattgaaaaacatcaggctgagttcagcatcaaagcaatgtgccgcgtgctccgggtggcccgcagcggctggtatacgtggtgtcagcggcggacaaggataagcacgcgtcagcagttccgccaacactgcgacagcgttgtcctcgcggcttttacccggtcaaaacagcgttacggtgccccacgcctgacggatgaactgcgtgctcagggttacccctttaacgtaaaaaccgtggcggcaagcctgcgccgtcagggactgagggcaaaggcctcccggaagttcagcccggtcagctaccgcgcacacggcctgcctgtgtcagaaaatctgttggagcaggatttttacgccagtggcccgaaccagaagtgggcaggagacatcacgtacttacgtacagatgaaggctggctgtatctggcagtggtcattgacctgtggtcacgtgccgttattggctggtcaatgtcgccacgcatgacggcgcaactggcctgcgatgccctgcagatggcgctgtggcggcgtaagaggccccggaacgttatcgttcacacggaccgtggaggccagtactgttcagcagattatcaggcgcaactgaagcggcataatctgcgtggaagtatgagcgcaaaaggttgctgctacgataatgcctgcgtggaaagcttctttcattcgctgaaagtggaatgtatccatggagaacactttatcagccgggaaataatgcgggcaacggtgtttaattatatcgaatgtgattacaatcggtggcggcggcacagttggtgtggcggcctcagtccggaacaatttgaaaacaagaacctcgcttaggcctgtgtccatattacgtgggtaggatcagtcatcccttcgtggatcattttgactgccgcctgcgctattctgttttttggcgcgctggcgagctgaaatcgctctttaaacccgacttcctgggtctcggtttcactattaccagacattattttcgccgcaccgccatgaaagcgcgtaaccacgcctttttgttcgagaaagcgcaaatcggcacggattgtcgcttccgaggcagcaaatactcccgccagatcctgaacaagcacggttccctgttcattcactaattggatgatcttattccttcgctcgaatgaattcatcgtcatttacccatattcaattgtggctagtgtaaacgaagggggaccattggtgaatgatctgttttgcacaataccgggccagcatcacgctggcccgcggtttcagggaatgagcaacactttgcccggcatagcattacgagcgatgtcacgcaccgcctgggcgaagctttcaaagcttccacggtgagcgattaatggctccaggcttaacttacgttctgtcagcaaccggctcgccgtttcccactcctgccccggccaagggctggagtagttcatccaactgccgataaccgtcagctctttacgcaatattttgccaaacgttgccgatgttaaatgcagatcctgatgcaacgtgcccaccagcgccagttgggcatgaggaccggcaatctctaccgccagttcgacagtttgcggtacgccagccgtctcgaggataagctgattaaagcgcagttcgcgtaaaacgctctgcatttgcggcgcgctcatttcgctactgttaaatgtttgcatcgcaccgaaagattttgccagtgccagtttttctgaactaatgtcgatcgccgtcacactctttgctcccagcgcgacagcgcactgaatggccagcaggccaatggttccggcaccaataataataacgtttttattctcacaaccttgcgctaaatgaaaagcatgcagaccaacggtaatcggctcaataaaagccccatcctcaataggcatatccgtgggtagagcaaagacattttttcgcttaacgacaatatattcagcaaatccaccatcacgccgcgagccaataaaatcatattttgcgcactgggaataaaaccctttcagacactctggacaagtaaaacagggtaataacggcacacaggcaaccgcatcgccagggtgtaaatcatcaacaccggatcccaccgcatcaatatagccgctaaattcatggcctaacgttattggataataatgtgcaccatttttaaatatcctgggtaaatcggaaccacataagcccgagctggcaatttttacccgcacctcatcctgatgtttaatttcaggaatgacgctttctgcaacgcgcacgataccatcagtatcattcaccactgatttcataaaaactcctgattgttaagggggataacctccccctcaggtaaaaattattctgcgagaacgactttctcttgtttaataaagccacgcgctctacgccaggtcatgaaaataccggtcagataaattgcaccgataataatgaaaccgggaatattttgcggggagaaaacctgaatcagtaaccaggtaatgggagaaccgccctgatccattgaagccaccatacccccggcttttaacgccccagcattagccgccagttgggtgtgcaaaccaatagtttgcgtcgcgatccacagggtgatgctcataatgatgacacccgagattaaggtgcggaacagatttccacgatgcacggcgaccgccatcgccacgaagaagccgatggtggcaagatcgccaaacggcagcacctgattacccggcacacaaacagcaattaaaatggtgagtgggataaaaatcaggcttgccgataccaccgccgtatgtcccagcagcaacgccggatcaaggccaatcaggaactcctgaccgccgaacttcgcctgtaaacgactacgagcctgcttagcgatgggcgttaaaccatccatgatgggtttaatcacccgtggcattagcagcatcactgccgccgtttttaccgccagctgcaatacacctttgacatcgtaacccgcgaggatgccgataatcagccccatcacaaaacccacggtgacaggctcgccaaatggaccaaatttgcgctgaatatcgtcggcgctaaatttaattcggttaacgcctgggattttctcgatgatagcatcgaccagcaccgcaatcggccccatatacgccgacgtaccgtgcggaatagcaataccttccagctcaaagaaatttcgggtatcgcgggcaaaccagtcgccgagcttataaacaaacgccgcgtgaattaccacacctgccatccctatcatccatgaaccggttgccagatgcagcaacgcgccggtgaaggtcatatgccagatattccagatatcaacatttaccacccgcgtcatacgggtcagtaacatcgccacgttaaccagaatcgcaatcggaatcgccaccagcgcaatttgcgacgcccaggtcattggtgaagagcccggccagccaacatcgaccacatgcagattcaggtcgaaattttccgccatcgctttcgccgccgggccaatggaatccagcattaagccaatcacaaggccaatgccaacaaagccaatcccgatatgcagacccgctttaaagcaatcgcctgccttcatgcctaatattttagaaaaaataatgatgacaatcggcagcatcaccgtagggccgaggtcgagaatataacgcatgacttctgaaaacataggtcacccctgtaagatagtcagaattttattttgtaatgcttcgataccgataccagaaataaaaggcatgccgtgaactaacggaatatcgccaaaactacgatccactttggcagtggtgcatatcaaatgcacaccatccatataggtttctatttcattaacccgacactggattaattcaacaggaatattatgattctgacacaactctttaatttcttccgccgccatcgtagaggtcgcaaccgcgcctccgcaagcgacaataatcttgcgtttcataaatagtcctttttattgttacagagggatttattcgtctgaatctaaaacatactttgtgaagtattcctttaactgggtttcaggaagagtgattagtgtctcgacgatatcgggctgttgtaacttgccaaataaacagcgtaaaagtttcaattgctgctgcggattttccacaatcaacgcaataaccaacgataccgccacgtcgttatcatcatccgcttgctgaaaatgaactttatttgttggccttaacagataaatggctgacgacttagggaaggtgcgaacaagtccctgatatgagatcatgtttgtcatctggagccatagaacagggttcatcatgagtcatcaacttaccttcgccgacagtgaattcagcagtaagcgccgtcagaccagaaaagagattttcttgtcccgcatggagcagattctgccatggcaaaacatggtggaagtcatcgagccgttttaccccaaggctggtaatggccggcgaccttatccgctggaaaccatgctacgcattcactgcatgcagcattggtacaacctgagcgatggcgcgatggaagatgctctgtacgaaatcgcctccatgcgtctgtttgcccggttatccctggatagcgccttgccggaccgcaccaccatcatgaatttccgccacctgctggagcagcatcaactggcccgccaattgttcaagaccatcaatcgctggctggccgaagcaggcgtcatgatgactcaaggcaccttggtcgatgccaccatcattgaggcacccagctcgaccaagaacaaagagcagcaacgcgatccggagatgcatcagaccaagaaaggcaatcagtggcactttggcatgaaggcccacattggtgtcgatgccaagagtggcctgacccacagcctggtcaccaccgcggccaacgagcatgacctcaatcagctgggtaatctgctgcatggagaggagcaatttgtctcagccgatgccggctaccaaggggcgccacagcgcgaggagctggccgaggtggatgtggactggctgatcgccgagcgccccggcaaggtaagaaccttgaaacagcatccacgcaagaacaaaacggccatcaacatcgaatacatgaaagccagcatccgggccagggtggagcacccatttcgcatcatcaagcgacagttcggcttcgtgaaagccagatacaaggggttgctgaaaaacgataaccaactggcgatgttattcacgctggccaacctgtttcgggcggaccaaatgatacgtcagtgggagagatctcactaaaaactggggataacgccttaaatggcgaagaaacggtctaaataggctgattcaaggcatttacgggagaaaaaatcggctcaaacatgaagaaatgaaatgactgagtcagccgagaagaatttccccgcttattcgcaccttccttagcatgaatcgcctcacaatgcggtattgcaatagcgtgctgctcaagcattatcccggtagggaattctgcttctctggcaattaatgcctgtggccaggtatcatgaaccacacctttggcgagcatctcattaccgatatgggttaaaacttcgctacgatcgacaaaagaaattccgctacgaacaaacaggttagtcatataccgtccttattccgcacagccgtagcgataggcgcgcaaaacatcataaattttatccataatcagctgatgcggtattgctgataattccccggactgaatgcgttcaaattgtttgggaagatactgactaatcatgcccagtgggatgtccacgccttcaagattcaccatcatcgtttcgacgctatttttaatccgactatgcggccagtaataacgaatacgatccgacaggctgtaacgaatatccagtaatgaatcgttaaaacccgtacgataatattttttccagtattgcggttcgtcgagcatcacttcttcaattaccgccaggcaaccgctgcgattttcaggggcgataagttcctgctcaatttgtgccagtgcaaatatcgcctcgcgtaaagcaaaggttaatgcgggaccgactttcaatattgcaaagtgatcgcggactaattcccaataagccgtccgggtctggtaatcggtagaatgtgcttcataaaccattcgggtgttttctatccattgcgccagcggctgcgcttcctgcggctgataatggataatattgctgtgatcaaattccacacccggctgcaccacgatggcaatcacacgtgttaacgcctctgtcagcccacgggcaataaaggccttttgatgcgtacgtaaagtattggcggcatcttcaacatgggtgatgtgtactgactgaatggcgctggcctcaccgcccggaaccggaacttcggtgccaatgacatagctcagttgctcacgctggcaatctgtcgccacactttccgcagcaaagcaaagcacagcagctcgttccgcaaccgtttctggtgctaacggtatgggatcccccgcgcaggacattgacgcatcaagatgaattttactgaagccggcacgaacatattcctttaccagctcgacggatttttccatcgccgcatccgcattttcttgctgccagcagtttggccccagatgatcgccgccgagaataatgcgttcgcgtgcaaacccaactttatcggcaatcgtaaaaacaaattcgcgaaagtctgccggtgtcattccggtataaccgccaaattgattgacctggtttgacgttgcttcaatcagcactttgcgcgtgctgttgcgatcaaatgccagcgccgcttcgataaccaacggatgggcagaacagactgaacatatgccgatatgttcaccagctttatgccgggcaattaacgttttcatgttttttccttgttaaatggcaggtgcgttatgccctgccctcgcagccacaatcggcaatcactttgctcaccacatcgcgcattgcggatttagccgactgcaaataatcccggggatcggtcgcttcagggtgctcggtcaggtaattttttaacgcctgcgagaaggcatttttcagctccgttgcaacgttgattttgcatatccccagtttgatggtttgctgaatatccttagtcgataaccctgacgcgccatgcagcaccagcggtaagttcacccactggcgaatgttctccagtctagaaaaatcaagcgccggtgcgctggcatacatcccatgagccgtgccgatggcgaccgccagggaatcaattccggttgcctcggcaaattcacgcgcctgagcggggttggtgtacaacgcatcggcttcattgacttgcacatcatcttcctggccgccaagttgccccagctccgcctcgacgctgacatcaaagcgatggcaaaaatccaccacctctttgacccgtgaaatattttgcgcaaaaggcaaatgcgaggcgtcaatcatgactgagcgcacgccagaacgaaccttctgagcgatatcgtcaaatttcgtgtgatggtcgagatgaattgccagtggatggtgatattgcttcgccatcgcgctgaccagcgccaacagattttctgtaccagcatgagtaaatgtgccaggcgttccggcgatgatgaccggcgcatgcaggttggcagcggtttctaccaccacttgcatcgtttcgagattgtgaatattgaatgccggaaccgcataaccgccgcgctgtgcgttgttcagcatctgctttgtcgataccacgtacattttcatatcctgtcgtttgttttcgatttcaaaatataatgaaattatttgtttttaaatatcgagataacgatcacaaaaacgacaatatgaaaattattcgaggagtgaaaggcaaaaaaacggcctcccgatagggaagccgtagcaaagtgcgcgtgtttttatgccggatgcggtgtaaacatacgtggcagtgctatgtaggcatgataagacgcttcagcgtcgcatcaggcataggttgccggatgcagcgtaaacgccttatccgtcctacggggtggtgttgttcgtataaggcgtatcaggcgatagtaattttgctatcgagataaacgtcctgcacggcgttaatcagtttcacgccgtcagccatcgatttcttgaacgctttacgtccaagaatcagccccattccgcctgcgcgtttgttgataaccgcagtacgcactgcatcgctgaggtcagtttcaccgcccgcagcaccgccggagtttatcaacccagcccgacccatatagcagttagctaactgataacgcaccagatcaatcgggttttcgctggtcaatttgctgtaaacacgatcgtcggtgtaaccgtaattaattgctttatagccgccgttattttccgccattttttgtttgacgatatctgcaccgatggttgccgccagatggtttgcctgaccggtcaggtcggcggaaacatggtaatcaacgccatctttcttaaaggcggagttacgcaaataggcccacagcactgtcaccatacccagctcgtgcgcacgttcaaaagccgcagaaatttcttcaatctggcgacgtgactcttccgagccaaaatagatagtcgcaccaaccgcaaccgcgcccatgttgaacgcctgctccacgctggcatacagcgtttgatcgtaggtattcgggtaacttagcgtctcgttgtgattaagtttgacgaggaatggaatgcgatgcgcataacgccgcgataccgacgccagcacgccgtaagttgacgccacacagttacagcccgcttcgatcgccagttcaacaatgtttttcgggtcaaagtagagcgggttagcagcaaatgaagctccggcagagtgctcaacgccctggtcaaccggcagaatagaaagatatcctgtgccagccagacgcccggtgttgtacaacgtctgcatattacgtaacaccgctggcgggcgattattgtcaatcattacgcggtctacgtagtcatgtccggggagataaagctggtcagaaggaattgtcatacaacggtgctgtaaaaggttgtcggcgtctttgccaagcaactgcgcaatatctgtcattactatgctcccgtaaattccgattggatatcggctatggattgtcctggcccgccttttgcgggcaatcataatcctggtcgttacgggcgagtttttccatcttttggatgttttttcagcgttttctgttggctcgattcatcagaaaaaatgttagcgcggtcaagttttcaccgcaaaggtatttaaaaggtattattaagtggtattgtcatcgcgtaccttacattacctgtcatgaaggaattaaaagatgaaaacaacagcaaagctgtcgttcatgatgtttgttgaatggtttatctggggcgcgtggtttgtgccattgtggttgtggttaagtaaaagcggttttagtgccggagaaattggctggtcgtatgcctgtaccgccattgcggcgatcctgtcgccaattctggttggctccatcactgaccgctttttctcggcgcaaaaagtgctggcggtattgatgttcgcaggcgcgctgctgatgtatttcgctgcgcaacagaccacttttgccgggttcttcccgttactgctggcctactcgctaacctatatgccgaccattgcgctgactaacagcatcgcttttgccaacgtgccggatgttgagcgtgatttcccgcgcattcgtgtgatgggcactatcggctggattgcctccggtctggcatgtggtttcttgccgcaaatactggggtatgccgatatctcaccgactaacatcccgctgctgattaccgccggaagttctgctctgctcggtgtgtttgcgtttttcctgcccgacacgccaccaaaaagcaccggcaaaatggatattaaagtcatgctcggcctggatgcgctgatcctgctgcgcgataaaaacttcctcgtctttttcttctgttcattcctgtttgcgatgccactagcgttctattacatctttgccaacggttatctgaccgaagttggcatgaaaaacgccaccggctggatgacgctcggccagttctctgaaatcttctttatgctggcattgccgtttttcactaaacgctttggtatcaaaaaggtattattgcttggtctggtcaccgctgcgatccgctatggcttctttatttacggtagtgcggatgaatatttcacctacgcgttactgttcctcggtattttgcttcacggcgtaagttacgatttttactacgttaccgcttacatctatgtcgataaaaaagcccccgtgcatatgcgtaccgctgcgcaggggctgatcacgctctgctgccagggcttcggcagtttgctcggctatcgtcttggcggtgtgatgatggaaaagatgttcgcttatcaggaaccggtaaacggactgactttcaactggtccgggatgtggactttcggcgcggtgatgattgccattatcgccgtgctgttcatgatttttttccgcgaatccgacaacgaaattacggctatcaaggtcgatgatcgcgatattgcgttgacacaaggggaagttaaatgaaaacagaacgtattctcggtgctctttatgggcaggcgttaggggatgcgatggggatgccctccgagctttggccacgcagccgcgttaaagcacactttggctggattgaccgttttcttcctggaccaaaggagaataacgcggcctgttattttaaccgcgccgaattcaccgacgatacctcgatggcgctgtgtctggcggatgcgttactggaacgtgaaggcaagatcgatccggatctgattgggcgtaatattctcgactgggcgctgcgtttcgacgcctttaacaaaaacgtactaggtccgacctcgaagattgcgcttaacgccattcgcgacggtaaacccgttgctgaactggaaaacaacggcgtgaccaacggcgcagcgatgcgcgtctcgccattaggttgtttgcttccggcgcgtgatgttgattcctttattgatgatgtagcgctggcgtccagcccgacccataaatccgatctggcggttgcaggcgcggtagtcatcgcatgggcgatttctcgtgccattgacggagaaagctggtcagcgattgttgattccctgccttcaattgcgcgacatgcacagcaaaaacgcatcactacgttcagcgcctcactggcggcgcggctggagattgcgctgaaaattgtgcgcaatgccgacggcaccgaatccgccagcgaacagctttaccaggtcgttggcgcaggtaccagcactattgagtccgttccgtgcgccattgcgctggttgaactggcacaaaccgacccgaatcgctgcgccgtcctgtgcgctaaccttggcggcgacacagacaccatcggtgctatggcgacggcaatttgcggcgcgttgcatggcgttaacgctatcgatcctgcgttaaaggcggaactggatgcggtaaatcagcttgatttcaaccgctatgccacagcgctggcgaaatatcgtcaacaacgggaggcggtatgagcggcgctcgattacacacgctgctgcctgaattaaccacgcgtcagtcggtgatggtcgtcggcgcggcggtcattgacgtgatcgccgacgcttatgccctcccctggcgtgggtgcgatatcgaactgaaacagcagagcgttaacgttggcggctgcgcactgaatattgccgtggcgttaaagcgcctcggcatcgaagcgggtaatgccttgccgctcggtcagggcgtgtgggcggagatgattcgcaaccggatggcaaaagagggcttaatcagcctgatcgataacgccgaaggtgataacggctggtgtctggcgctggttgagccggatggcgaacgcacttttatgtcattcagcggtgttgaaaatcagtggaatcgccagtggctggcgcgattaaccgttgcgcctggcagcctgctctatttttccggttatcaactggcctcgccctgcggcgaattgttagtggaatggctggaagagctgcaagacgtgacgccgtttatcgattttggcccacgtattggcgatatcccggatgcattactggcgcggatcatggcctgtcgacctttagtgtcgctcaatcgtcaagaggctgagattgccgccgaacgttttgctttatccgcagagataacaacacttggcaagcaatggcaggagaaatttgccgcgccgttgatcgttcgtctcgataaagaaggcgcatggtatttcagcaacgacgcttctggctgcattccggcatttccaacgcaagttgtcgacaccattggggcgggcgacagtcatgccggtggcgtacttgccgggctggcctctggtctgccactggcggatgccgtattactgggcaatgcagtggcgtcgtgggttgtcgggcatcggggcggtgattgtgcgccaacgcgcgaggaactactcctcgcacacaaaaacgtatagatcgctgcgacagtggctaatgctgtactcaataggccgttgctgttggtcaagcgccacttgcttgatcaccagcaccggtattttgctatctaactgaatatgtgactgaaactcggcatccggcatccgggcgctaacgcgggaacgcgtacgttgtgggtaaatgtgctggctgcggaaatagtcataaagtgaaatcccgatggcatcaacatcatgaattaaatgcgccggaacccacgattcctcaatcgataccgcttcttcatcgacatagcgaatacgcttaagcaaaaagacatcacttcctgcttcgaccgccagctgctgcgcgacttcttcgggacatttcacgacacgcttgttaacccatagcgtatcgggctttttcccgcgcaataccacctgctgagaaaaacctcgcgcttctttcaacgagtattcgaagatgttgttgatctgcgtgccgtaaccgcgcgaacgcgtcaccacaccctcttcttccagcgcctgcatcgccttgcgcaccgtaatgcgcgaaacgccggttaactgacttaaatcacgctcaccgggcaaaatattgccatgctccagcaccccgctgcgcacggcattttttaccgtttcggcaaacttaatataaagcggcgtgttatccgccgctaaaatacgctcgttcagttgggcaatcagctgggtatgcgcttgttccatttgtctttttcctgccggggagtctggtgggagtatatcactgcttcttatttaaggcgtttctttaatcccatcaacgaatgcctgcaactcctccaccgtgccattaaatacattaaaatccaccggaccattgatgccatctacctgtccacggtcggaatgctgccagaagcgccaggccattccgtcattgtccggacgacgttgatagtagtgagccacccaccacggatattcattgaaatagcccgccagattggtgtgataaaaaacggctcctgagtaaataatcggctttttccccgtacttttttcgaccatttttagccactgacttacccgcttgcgtaattcttttgccgataattttccccgttcttctacgtccagcacggcagggaaatcgccttgtgagaaatccaccgtttgcagaaataatctcgcctgaactgaagcggataccgacggggagaaataatgatacgccccacgcagcaggccattttcgcggcttagttgccagttacgcgaaaaataggggtccaccagcttttcgccttccgtcgccttaataaaagcaaactgtaagcggataccattgtcgcgcatttttgccacccgctgccagtcgatccgctcctgccagcgcgaaacatctattccgtgaatggtgtaactggcaggaatgcgaatagcgaaagatttaaccgggcgataaccgtagaagtggatgtagtctgtaatctgaactgctgtcgaatagaaaaaattcaccgtctgacgcggataaattgcaacgatggaaattagcccaagagcgcataatagagaggtgagtttttttcgactggtaattcttagctgcattggtttcatccctgaatgtcagtgccaaaggctgacaataaccaaagcagctatagtacggtgctcaccaccaggcgtggaagtggtgaaccggaccaataccgtgaccaacttccagcgtgtcggcctgggctaacgccgatgaaagccagctttttgcctcctgtacggtgtcagcccagtttgtatggcgcgggcgtagtgcagccaacgccgcagagagtgtacaaccagtgccgtgggtgtttttggtcataatgcgcggtgcggtaaaccgttgttcaccctcgcgggtaaacagccagtccgggctttgctcatcatccagatgaccacctttcattagcactgcgccacagcccatcgccaacagcgatcgcccttgttccagcatttcctgttcggtgcgcgcgtgtggcgcgtcgagcaaggcggcagcttcgggcaagtttggcgttattaatgaaacctgtggcaataatcgactgcgcagcgtagcaaccgccgaaggtgaaagcagcgggtcgccgctttttgccagcataacggtgtcgagtaccacgttttggatctgataacgttgcaaccgttctgccaccgcttcaacaatatcggtttccgccagcataccgattttagtggtatcgattcgcacatcgctgaacaccgaatcgagctgggcggcgacaaaatcaggctcaatgcgatacaccgactgtacgccacgggtattttgcgccaccagtgcagtaataactgagcaaccataagcgccaagtgccgagaaggttttaagatcggcctgaatccccgcaccaccactcggatcagtaccggcaatcgtcagagcgttaattcgtttcatgcctgcacctcctgcgtcaattgccagagcgcatcaaggaaatgtggaacaaaactgcctggcccctcgcttctggcgactgcgcgttctccggcttgtttcatccagtgacaggcagatgcgacattttccagcgtatcgcctggtaacgcacagcaggcagcgacaaccgccgataatgcacagccagttcctaccactttggtcattaacggatcaccaccgtgaataccaatgatacgatgtccatcggtaacataatccatctcgccagtgaccacgacgattgcgccagtttcccgtgccagtgtttgtgcagcgggtatcgcgttagctgcggcgtcagtggtatccactccccgtccgccattagcaatgccagctaatgccatgatttccgaagcattaccacgtatcgctgccggtttaaaagataaaagttcatgacaaaaatggcggcgataatcgagcgcacccaccgctactggatcaagcgtccagggtgtttgagagctttttgcttgctcaacggcagcacgcatcgcctgagcgcgtggctgcgtcagtgtgccaacgttaatcaacaaggcactggcgatagccgcaaactgactggcctcttcggtttcgataaccatcgctggcgatgcaccgagcgccagcaaggtattggcggtaaaggtttgcaccacatcattggtcatgcagtgcacaagaggggaatgttggtgaaaaaggtgtaacgcgtgcgcagattgcgctgaacccagcaggtcgacttgcatagtttgctcctgccataacgtgaagaagcaatgacctggtggtccgtgacttccctacgctggcattatccagatcaggtgatacgggtatttctcagccttcacgcagaagggcaccccgagtcgtttggttgcgatgataaatcgcagaggaggatggtaatgtccagcgcacgcgttgtaaacgaggaaaaacggcagttttacaatcgcgttaataaattatttgatatatgaatccagcaccttcagaacgacatccagatcttcttcacgttttagctcatccccctggtgaacgatgtgttccgtcagatgacctttaatcacttcccgcatcagaccgtttaccgcgccacggatagcagcaatctgttgtaaaactgcagcgcattcgtgcggctcgtcgagcattttcttgagcgccacgacctggccctgaatcttactggcacgcgctttcagtttctgtttatcacggattgtatgagacatggcaacacctggttaacaagaatatgaaaaatcatagcactattaatctactggggggtagtatcaggtactgggggggagtagaatcagattgccgaattaatactaagaattattatcatgaccgaatttacaactcttcttcagcaaggaaacgcctggttcttcatccccagcgccatcttacttggtgcgcttcatggcctggaaccagggcactcaaaaacgatgatggcggcgtttatcatcgccatcaaaggcaccattaaacaagcggtgatgctcggactggcagcaactatttcgcataccgcagtggtctggttaattgcctttggcgggatggtgatcagcaagcgctttactgctcaatcagcagaaccgtggctccagctgatttccgcagtgatcattattagcaccgcgttctggatgttctggcgtacctggcgcggcgaacgcaactggctggagaatatgcacgggcatgattatgagcatcatcatcacgatcacgaacatcaccacgaccatggacatcatcaccatcacgaacatggcgagtatcaggatgcccatgcacgagcccatgccaatgacattaaacgacgctttgatggtagagaggtcaccaactggcaaattttgttatttggcttaaccggtggccttatcccctgcccggcagcaattaccgtgctgttgatatgcattcagttgaaagccctgacactgggcgcaacactggtcgtcagtttcagcattggcctggcgttaacgcttgtcaccgtaggcgttggcgcagcaatcagcgttcagcaggtcgcaaaacgctggagcggatttaacactctcgctaaacgcgccccctatttttccagtctgttgattggcttagtcggtgtgtatatgggcgtacatggcttcatgggcataatgcgataactcaatcctttaggcttgcatgttatcttcagcccaggatgattcttaaatcagctatttccgctgactctctgctcgctaaggatgcttttagggcatcctttcatttacactttttacgaaatcatgggatcactaacaaaatatcgcttgtcagttatattgtatggcaggaaagatatgcgactgatattacagatccccaaagtggagagtttatgaccattaaaaataagatgttgctgggtgcgcttttgctggttaccagtgccgcctgggccgcaccagccaccgcgggttcgaccaatacctcgggaatttctaagtatgagttaagtagtttcattgctgactttaagcatttcaaaccaggggacaccgtaccagaaatgtaccgtaccgatgagtacaacattaagcagtggcagttgcgtaacctgcccgcgcctgatgccgggacgcactggacctatatgggtggcgcgtacgtgttgatcagcgacaccgacggtaaaatcattaaagcctacgacggtgagattttttatcatcgctaaaaaaagccccctcatcatgagggggaaatgcagacaccttgttattttttattattagccacttgctcgtcttgcttgttattagtcgtatttcacgttgattaatgcggttgcctccagtgcgccagatttaactttgtttgtatcgtagacgtagtaactggctgttatcggaattgaaaccgttgtatctgtaagttttgacttcgccgcaacttcctttaaatttgtatatcctttactgctgttagtgatatttaaaagtgtgactggcgaaccattactttcaagaataaatcctacgccattatcttccgcacctttcagtattgtgttgctgttggttaacaagtcagaacttgataaatacacctgcattttccgtgatgtttgattttgttgacctaataaatttttacaacgcagaataatatccccttgtttactatttattgttgctttgttacctgtggctggtaattgtgaaacgggaatactgtctaaagtaattaataaatcgtccggtttgcaggttgtggttatcgggttgtatgacaatgtcagattaaaggaatagacacctgcattttgtgccaatgcatttctgtagctatttacacatgcatcccatgacttgccacctaataaacacagtagaaattgtactgcggcactcccgcgtgtcgatgatgaagcactggataatgtcgcaacaccattaatcatcactgaaccgccgccccccgcagaaacattcacttttgcattactggccgcaggtgtcaccgtaactgaataaccactggtgaaactggtctgattatttgacaacgtgatgttgtttttattggtccattcaaaatgtaaatttaattttatggtatcgttataaagtccaacaataatatccgacgggctcataggggtgatagtatttgtacttacgcatgacgaatcattaaaattatgctcatatgtcgccatttgtgtttgagtaagtgcaaaatccccctgaacaaccaagttgtgctgaacagataactcactataacatgccgcatagctcacaggcataaccatcatcattaatataaatagcattatgcgaatttccatagaaccacctgactattactggcaaatataatttctactttcatcaatctctttaccgaaggtgattgtgcatgaaagtccttgttgcttatcaattgccacattaaccgatggcggtacttcattggtgcgaataaataactgacttccctggccgacaacgccaatattatgaccatggatatcattgacttcataaccaaacgttaatgattgcccatctgctcttaacgcttttataaaccatggcttgcgctgatcggtatcaaaattaaccagtacaaccgcgccgcgataaggggcggcaattttccggttgccacgtaattctgcttcgctatcgctttgcgacacatccagcatcaggtgattttcccgataaggtgtcattccgtcgtatatcaccactccattacggtttgttgtgcgatatttttgcccattgacataagcatctttaattcctggcgcattcatcacagcaaacgtttcggaaagacggttcgccagattaacgccacccgaccaggcgacaatgccccctgaaacactggctccagcctgtcgataagtactcgactgactataactgccattcactgtcgcaaccggcgcgttccaggtcaaattcgccccagctgtcgtttcatttccctgatgttgatgactcaggttgacaccataattgaactgatcccgactccctactgttcctgataatcccgtattatttgaggcaaacccctgatcatcaaacgtcgttgagttagacatatatatttgccgacgaggcgtcgaaacgtcatcaccccaatcaaagggaatcgatataaaaatattaaaacgtttctcttcatgatgattctcgtcataagcctggcttgccgcgagggtatagcttatccgtcgcaggttgttggaataactcaactgataatccttactactgccgctacgcccccagtaatctcgccataacgtacttaatgacacagacccccaaccttctggcaatgactggctcatattggcggaaaagctatttttgcggccaaaatcgttctggtaataatcggcaatgtcatagacatcgttttcatcacggcgataattatctttattgtttgcccaaacgtgatcgttaaatgtccggtaatcacgcgacgaataacgccaggccgccagaccaaaacgcgtcgacgtttggctcacaaatttgttgtaggcaatttgataactttgcccgtcaaacacatcgccgttgtcttgtttactatgcgacttagtggcatcgacggaaatggcaccaatgcgtgtattccagccagcccccaaagtaaacgcgtaataattattcgcgaccatcgagccaccatacagcgtcaataaattattaaaaccatactgataacccgcctggacaaaatcactttgtttgctcgccccttcaatatggctacgacccgccgctaaatcatatttcgacacgccgggttgcagcatatttggcaccgctgcataaggcaccagataggtggttaccgagccgtccgcctctttcacgctgacatcaagatctgctccaccaccggccaactgcaaatctgtaatcgcgaacgggccaggaggaacctctttctgataaaccacaaaaccattctgttcaatagttaccagcgcgttactctgagcaatcccctgcacccgtggcgtaaaattttgtttcgagttaggcaacatctgcatatcacgaaacaaccgcacacctctgaagcgaacagaatcaaaaatatcgcttgatgtgtacatatcacccacgcgaagcgtgccgagaagttgggcaaatccacgttccagatacagggtattgcttttccacacccctggattgttatttgttttactgaaactggcatcagaatgcagttgccaccccagtaaatttaacccgctgttaaaacgtacatatgtactcttgttattacccgacgctttatagtcgctgtaatactgactcagataataagaggtataaaacgcattaataccccgctcccagttttccggtggaacatagccactttccagttcttccacccaggcctgcgggacactgaaatcgagacgaaaaaccccgatatcccaggtatagctcccaccctgaacaagttgctcaaatgttaaacattgcttaccgctggcgaagttatcgctattaatgcctaaccgcttgataacttctcttgataaacatgtttcttgcgggttgtctttaacaataatctcatatttcccgcgccattgcttattgacataaatatcgatgtcatactgccccggtaagggttgattatcatcaagacgaatatttgcaacctgctggtctttcattccacctatcataaaatgggtatcaaaggtttcttcagctgcataagcttcaatgccgagcaataacgctacgattgctgatgcaagtggggtcattctcaacataggcagctcctgcaattaaattttgtcactaatatagttgccatggtcatcgataatggtcagatgccagttatttgcattattacttttgacattaacactctgactttctaagggggcaatcataatagtttcataattgactttgacattattagctttgacatccgaaatcgtcacccaattagctgagtcattttttatcaccaaaccattgccactgcgatttaccagcaattttttaaatgtcgctttatttaccggagcaatacccgctggccggtaaaacaacttaattctgttttgcatcgcaaacttcagtgcattcttaccttcttgctctggactatttggtggaatatccagaacattcagataaaaaatgctttctttattagtgggcagtttattcggcataattttgatttttacttgctgcccggaatttgcccctatttttgccactggtggcgttaacatgaaaggaacctgaattttttctggtggtaatgacgtatcgccatcatcaatccacgcctgcagcagcgaagaacggtttccctggttcatcaactgcaccatcacttctttattttctgccgggtaaataatgcgcgtcccgtagataacaattccggcatgtgcaggaaggaccatagaaaaaatgagtaaagataataatcctttcattttaatgcctcttaaattaaaaggccgccatgggatagcggccatgtttattacctggagaaacttacaattttatttattaatcctgcgccacacgcataaccagagaagataacacatcacctgattgcactgagttatctgtcagtttcaggtattttgctttaaacggaatagcatattgaccttccgctgttttataactctcaatgttaaaaggtgcagaaacatccaggacatcgctgttatcacctaaatagagatagtaacccacggtatcgttgctactggctatcgccttatcgttaccggttattttatcgttggtaatcaacgagagttttacaccagcaacttctttcgggcagctaatttttaacatgctgctggttacaccgactgcatcatcataggtagaatatttagctttaccttcaaagacactggttggtacagtcggcatattaatacttactgaatcaccacccgcttcgaatttacacggagattctgcaatattccccttaatagttaatgttccggtatcaacgtctgcagcaaatactccagcgctcataaaaaaagaagaaaagacagcggcagcaataattgaacgtttcataatatgttccttaataaaatttatttttggttgttaagagtctgtatctcttggaaacaaatttctcacatcaaaaaagttgccgcaatgtaaacacattgttttattgatttaaaacaaattaaccattgcaatataaatacaaaaaatatttaagagtattaactatttatcgcatctatcaattaatgtagatttatgtaaatggtattgttgatatcaataaaaaagccgaaatcatttatataaatgatttcggctttctaaatgcaattaaaatcaggttgccaaattaatcgtagcgatttaacacgattcgacgtttgctatcgctacctgcaacaaccacttctgtcgttacacctttgacgggcgaagaaaacagatgacgggtgtcaacattatacgttaactgaccacaatgctgttgaggttgaccattaaccatagccatactgcatgttgggggactgatcctgccattaatcgctaatgtggcagtctctgaagagaatgcgggagaagccaatccataggcaagaaaaataattcctgacagccaatacttattcattgaacgttatccctgtagtaaaggttatgcctggatagaatgagtgcataacaaactatagctgtacatccactacacagccacgaaggatgataatgaagcattgcctgtatgatcaatcgactttgtagagtttcggacgaaggtccgcagaatattcgcagtattaaataagtgttcattaatgcggcaaaaactaatacaccgcatcaatgtaacatctctgcggtgtatgaagaataaccagaatggttaataggcgttagaccgcgcggaaggaaatctcgcctggaatgacttcaccctgccagtagagctgagctgcaacgcggtcagccagctggcggtagatagcggtaaattcgctctccggacggctgataaccgttggcgtacctttatcgagatcctcacgtaaggagatgtgtaacggcatctgccccagcagctgtgtatggtatttttcagccagtttctctgcaccaccggtaccgaaaatcggttcatggtgaccacagttactgcaaatatgcacactcatgttctcgacaataccgagcaccggaacctcgactttctcgaacatcacaatgccttttttcgcatcgatcagcgcgatgtcctgcggggtggtgaccacgactgcaccggttactggaatgttttgcgccagcgtcaattgaatgtcaccggtgcctggcggcatatcaagcaccagatagtcgagatccggccacaaggtttcctgcaacatctgcattaacgccttgctcgccatcggtccacgccacaccatcgcattgtcgtcagtgaccagataaccaattgaattggttgccaggccatgagacataatcggtgccatatgggtaccgtccggcgaagttggacgctgattttctgcgcccaacattgttgggattgatgggccgtagatatcggcgtccagaatgccgactttcgccccttctgccgccagcgccagtgccaggtttaccgccgtggacgatttacccacgccgcctttaccggaactcaccgcgataatgttcttcacaccgttaattcccggctgattcttcacgcgtttcagagtggctatgttatgcgacagtttccagtcgatagctttcgccccggtgatgcgcagcagttcggcgctacattgctcttttaactcttcgaacgcgctatgccagacaaacggcataaccagttccacatgcaacgtgtcgtccatccaggcgacatggtgcaacgctttcagcgtggtgaggttatgcttcagggttgggtgctgaaaattggccagtgtcccggcgaccattgcgcgcaaggcttctggtgatttggcctgggattgttcgttcatcccgactccttttttgtatagataaaccatcagctgatagtttacctgaagaatatagagaagtacttacttaacattttcccatttggtactatctaaccccttttcactattaagaagtaatgcctactatgactcaagtcgcgaagaaaattctggtgacgtgcgcactgccgtacgctaacggctcaatccacctcggccatatgctggagcacatccaggctgatgtctgggtccgttaccagcgaatgcgcggccacgaggtcaacttcatctgcgccgacgatgcccacggtacaccgatcatgctgaaagctcagcagcttggtatcaccccggagcagatgattggcgaaatgagtcaggagcatcagactgatttcgcaggctttaacatcagctatgacaactatcactcgacgcacagcgaagagaaccgccagttgtcagaacttatctactctcgcctgaaagaaaacggttttattaaaaaccgcaccatctctcagctgtacgatccggaaaaaggcatgttcctgccggaccgttttgtgaaaggcacctgcccgaaatgtaaatccccggatcaatacggcgataactgcgaagtctgcggcgcgacctacagcccgactgaactgatcgagccgaaatcggtggtttctggcgctacgccggtaatgcgtgattctgaacacttcttctttgatctgccctctttcagcgaaatgttgcaggcatggacccgcagcggtgcgttgcaggagcaggtggcaaataaaatgcaggagtggtttgaatctggcctgcaacagtgggatatctcccgcgacgccccttacttcggttttgaaattccgaacgcgccgggcaaatatttctacgtctggctggacgcaccgattggctacatgggttctttcaagaatctgtgcgacaagcgcggcgacagcgtaagcttcgatgaatactggaagaaagactccaccgccgagctgtaccacttcatcggtaaagatattgtttacttccacagcctgttctggcctgccatgctggaaggcagcaacttccgcaagccgtccaacctgtttgttcatggctatgtgacggtgaacggcgcaaagatgtccaagtctcgcggcacctttattaaagccagcacctggctgaatcattttgacgcagacagcctgcgttactactacactgcgaaactctcttcgcgcattgatgatatcgatctcaacctggaagatttcgttcagcgtgtgaatgccgatatcgttaacaaagtggttaacctggcctcccgtaatgcgggctttatcaacaagcgttttgacggcgtgctggcaagcgaactggctgacccgcagttgtacaaaaccttcactgatgccgctgaagtgattggtgaagcgtgggaaagccgtgaatttggtaaagccgtgcgcgaaatcatggcgctggctgatctggctaaccgctatgtcgatgaacaggctccgtgggtggtggcgaaacaggaaggccgcgatgccgacctgcaggcaatttgctcaatgggcatcaacctgttccgcgtgctgatgacttacctgaagccggtactgccgaaactgaccgagcgtgcagaagcattcctcaatacggaactgacctgggatggtatccagcaaccgctgctgggccacaaagtgaatccgttcaaggcgctgtataaccgcatcgatatgaggcaggttgaagcactggtggaagcctctaaagaagaagtaaaagccgctgccgcgccggtaactggcccgctggcagatgatccgattcaggaaaccatcacctttgacgacttcgctaaagttgacctgcgcgtggcgctgattgaaaacgcagagtttgttgaaggttctgacaaactgctgcgcctgacgctggatctcggcggtgaaaaacgcaatgtcttctccggtattcgttctgcttacccggatccgcaggcactgattggtcgtcacaccattatggtggctaacctggcaccacgtaaaatgcgcttcggtatctctgaaggcatggtgatggctgccggtcctggcgggaaagatattttcctgctaagcccggatgccggtgctaaaccgggtcatcaggtgaaataatcccccttcaaggcgctgcatcgacagcgccttttctttataaattcctaaagttgttttcttgcgattttgtctctctctaacccgcataaatactggtagcatctgcattcaactggataaaattacagggatgcagaatgagacactttatctatcaggacgaaaaatcacataaattcagggcagttgagcaacagggaaacgagttgcatatcagttggggaaaagttggcaccaaagggcaaagccagataaaaagtttttcagatgctgcggcagcggcaaaagcggagcttaagctgattgcggagaaggtgaagaaggggtatgtggagcaagcgaaggataattctttgcaaccttcccaaacggtaacgggctctctcaaggtagcggacttatccaccattattcaggaacaaccctctttcgtagcagaaacccgtgcgcctgacaaaaatacagatgctgttttaccgtggctggcgaaagatattgctgtcgtttttccgcccgaagttgtacacaccacgttaagtcatcgccgctttcccggagttcctgttcagcaagcagacaaattgccccaattacgtcgcttagcctgtagtgtgtcgcaacgggataataaaacagccacatttgacttcagcgcctgttctttagaatggcaaaacaccgtcgcccaggcgatcagtcagatcgacggcctgaaaacaacacagttaccatcaccagtaatggctgtactcacggcacttgaaatgaaatgcacaagatataaagtgcgtgaggatgttatggatcagatcgtccaggaaggcggtctggaatatgctactgatgtaataatacaccttcaacagattgatattgaatgggattatgcgaataatgtcattattattctgccgtctggcattgcacctagctacttggagcaatattccagatttgaatgacgcctacgtaaacatttatcactgacggaagagtctctctggcaaaaatgtgcacaaaaacttattgccgcaattccacatattccagaatggcggcaaccattaattgctttgttattacccgaaaaaccagaaattgcacatgaaattgcccagcgtctactggggcaaaaaaaattaccctcgcttgagtggttaaaaatagtggcgactgatgagcacattcttgcctcattagaaaaatatcacgaaccatatgccatttttgatgattactattgtggtgcgatatggtcagccaccgtattacaggagcaaggtgttgcagccctgccccgatttgctccctatgccgcaagtgactactgcgccgatgtgttgcgtcatatcaatcatccgttcgcattgacactgcttatacgtgtagccgggcaaactaaacgctgtcacgatcggatgacgaaagccattgctgcgttcccacatgcagcaatggcggcactgacggaacttcttgggcaaaaagaagagaacagttggcgcattatgctaatgacaatgcttatctcacaaccagcactggcagaacaggtcattccctggctctcgacacccgcagttgccgtactgaaatcatgccagcaacaactgacacagccctcaaaccatgccagcgccgatctactgccagccgtagtagtctcccctccctggctttcgaaaaagaaaaaatcgccgattccggtgctggatttagcgccattaggcattgagccaatctgttatctgacagaagaaatcagtaatcaacttttggcgaaatatatctggtattcaaaacacatcacggttagccatgaagaaagtactaccaacctgttggcaaggatgggttttcaacgacggatcgctggtacatatattaaagctcccgaagcggtagttgaggcatggctaaatgaagattattcaaccttactaagtgaatttaaggtgtttcattcacctaccgggcattattggcagttggggattttgacaacattgccgctggagaaagcagtaaaagcatggaatgcccttaccctatctccacataccgataccgaatactccatgttacattttggactcaaagggttacctgggttagtaaactcacttgcacgctatccacaagaagccttgcccatcacgaattacttcgcagcgagtgagctggctcctgccgtcgcccgtgccttcaacaaactgaaaacgctacgcgaaaacgcccgtagctggctgttgaaatacccggaacatgcccttaccggcctgctgcctgcggcgctcggcaaagccggtgaagcacaggataacgcccgcgctgccttgcgtatgcttaccgaaaacggtcatcagccattactgcaagaaatcgcccgacgttataaccagccggaagtaaccgatgcggtgaacgctctgcttgcgctcgatcccttagataatcacccgacaaaaatccccactcttccggccttttatcagccatcgctctggacgcgcccggtattaaaagcaaatgcccaatcactgccagatagcgccctcctccacctcggtgaaatgctccgcttccctcaggaagaggctctgtatccgggattattgcaggtgaaagacgtctgttccgccgactcactggcgggatttgcctgggatctgtttaccgcctggcagaccgctggcgcgccgtcgaaagagagttgggcgttcactgcgttaggcgttctcggtaacgatgacaccgcccgcaaactgacgccattaatacgcgcctggcctggtgaatcccagcataaacgcgccaccgttgggttggatattctcgctgctatcggtagtgatatcgcccttatgcagcttaacggcatcgcccagaaactgaaattcaaagcattacaggagcgggcaaaagaaaaaattgccgacattgccgagagccgcgaactcacggtggcggagcttgaagatcgggttagcaccggatctcggtctggatgataacggttcgctgctgctggattttggcccacggcagttcaccgtcagctttgatgaaaccttaaaaccgtttgtgcgtgatgtttccggcagccgcctgaaagacctgcccaaaccgaacaaaagcgatgatgaaacgcgggcgaacgatgcggttaaccgctacaaattgctgaaaaaagatgcgcgtaccatcgccgcccagcaggtagcaaggctggaatccgccatgtgcctgcgccgccgctggtcgctggaaaacttccagctcttcctggttgagcatccgctggttcgtcacttaacccgccgtctgatttggggcgtttatagcgccgaaaaccagctactggcttgctttcgcgtagcagaagataacagctccagcaccgctgacgatgatcttttcaccctgccggaaggcgatatctctatcggcactcctcacgttctggaaatatcaccaacggatgctgccgcctttggtcagctttttgccgactacgaactgctaccaccgttccgccagctcgaccgtaacagctacgccctgacagaagccgagcgcaatgccagtgaactgacccgctgggcaggcagaaaatgcccgagtggtcgggtcatggggctggcgaataaaggctggataaagggcgaaccacaggatggaggctggatcggatggatgatcaaacctttgggtcgctggtcgttaatcatggaaatcgatgaaggctttgcggtaggcatgtcgccagccgaactcagcgctgagcagctcttaagcaagctgtggctatgggaaggcaaagcagaaagatatggctgggggagtaattcaacacaggaagcgcagttctccgtaatcgatgccatcaccgccagcgagctaattaacgatattgaagccctgtttgaataaggaaagagcatggacaaggaattaccgtggctggcggataacgcccaactggaactgaaatataaaaaaggcaaaacgccgctcagtcatcgtcgctggccgggcgaaccagtgtccgttatcactggaagtctcatccagacattgggtgatgaattgctacaaaaagctgagaagaaaaaaaacattgtctggcgttatgagaatttttcactggagtggcagtccgccatcacgcaggccatcaacttgatcggcgaacacaaaccctcaatcccggcccggacaatggcggcgctagcctgtatcgcgcaaaatgacagccaacagttgctcgacgaaatcgtccaacaagaggggctggaatatgcgactgaggtggtgattgcacgccagtttattgcgcggtgttatgagagtgatcctctggtagtgacattgcagtatcaggacgaggattatggctatggttatcgctcagaaacctataacgaattcgatctccgactgcgtaagcatctctctctggcagaggaaagctgctggcagcgttgcgccgacaaactcattgccgcactaccaggaataaacaaagttcgccgcccttttattgcgctgatcctcccggaaaaaccagaaatagccaatgagttggtaggccttgaatgcccgcgaactcattttcattctaaggagtggttaaaagttgttgctaatgaccccacagcggtgagaaaactcgaacactactggagccaggatatatttagcgatcgagaagccagctacatgtcgcatgaaaaccacttcggctacgcggcctgcgccgcccttttgcgcgaacaaggactggcagccattccgcgcctcgcgatgtatgcccataaagaagattgcggcagtctgctggtacaaattaaccatccgcaagtcatccgcaccttgctactggtggctgataaaaacaaacccagcctgcaacgtgtagctaaataccataaaaacttcccccatgcgacgctcgccgcactggcagaactgctggcgttaacagaaccaccagcccgccctggttatccaatcatcgaagacaaaaagctgcctgcacagcaaaaagcacgcgatgaatactggcgtacgctgttacaaacgctgatggcatcgcagccacaactggcagcagaagtgatgccgtggttaagtactcaaccccagtcagtgctgaagagttatttatcggcaccgcccaaaccggttattgatggcaccgataacagcaatctgccagaaatcctcgtttcaccaccgtggcgtagtaagaaaaaaatgacagctccacgtcttgatttggcaccgctcgaattaactccgcaagtttactggcaaccaggcgaacaagagaggcttgccgccactgagcctgcccgttatttcagcacggaatctcttgcgcaacgcatggaacaaaaaagtggacgagttgtattacaggaactgggttttggggatgatgtatggctgtttctgaattatatactccccggaaaactggatgctgcacgcaattcactctttgttcagtggcattactaccaggggcgggttgaagagatcctgaatggctggaactccccggaagcacaattagcagaacaggcgctccgcagcggtcacatagaagcgttaattaacatatgggaaaatgacaactactcacattatcgtccggaaaagagtgtctggaacctgtatttattggcacagttgccgcgtgagatggctttgaccttctggctgcgtatcaatgagaaaaagcatctgttcgcgggtgaggactattttctcagtatcctcggattggatgcgctaccaggtctgctgttggctttttcacatcgtccaaaagaaacatttccgttaattttaaattttggcgcaacagaactggcgctgcctgttgcccacgtctggcgacgtttcgcggcgcagcgtgatctggctcgccagtggattttacaatggccggaacatacggctagtgcacttatccctcttgtctttaccaaacccagcgataatagcgaagccgcattacttgccctgcgtttactgtacgaacagggacatggcgaattgctacaaaccgtggcaaaccgctggcagcgtacagatgtatggtctgccctggagcagttgcttaaacagggtccaatggacatttacccggcacgcattccaaaagcccctgatttctggcatccgcaaatgtggtccaggccgcgccttatcactaataatcaaactgttaccaatgacgctctggaaattatcggcgaaatgctgcgctttacccaggggggacgtttttatagcgggctggaacaactgaaaacgttctgccagccacaaacgctggcagcttttgcctgggatctcttcactgcgtggcaacaagctggtgcccccgcaaaagacaactgggcatttctggcgttaagtctctttggtgacgaaagcacggcacgggatctgacgacacagatcctcgcctggccacaagaaggcaaatctgcccgtgctgtcagcggcctgaacatccttaccctgatgaataatgatatggcgctgatacagctgcatcatatatcgcaacgggctaaatcccgccccttacgtgataacgcggcggaatttcttcaggtggtcgcagaaaatcgcgggctaagccaggaagagctagcggacagattagtcccaaccctgggccttgatgatccgcaggcgttgagttttgattttggtccccggcagtttaccgttcgcttcgatgaaaatctcaacccggttatctttgatcagcaaaacgttcgccagaaaagcgttccccgtttgcgcgccgatgacgatcaactgaaagcgcccgaggcactggcccgactaaaagggctaaaaaaagatgctactcaggtgagcaaaaacctgctcccgcgtcttgaaacggccctacgtaccacccgacgctggtcgctggcagattttcattctctgtttgttaatcatccctttacccgtctggttacccagcgattaatatggggggtttatccggcaaatgaaccgcgttgtttactcaaagcctttcgtgtggccgcagagggggagttctgcaatgcgcaagatgagccaattgacctgcctgcggacgctctgattggcattgcccacccgttagaaatgacagcagaaatgcgcagtgaatttgcacagctttttgccgattacgaaattatgccgccttttcgccagttgtcgcgccgcacggtgctgctcacacctgacgagtcaaccagtaacagcctgactcgctgggaaggtaaatccgctaccgttgggcaacttatgggaatgcgatacaaaggctgggagtcaggctatgaggacgcatttgtctataacctgggtgagtaccggctggtccttaagttttcacccggttttaaccactacaatgttgatagcaaagcgctaatgagcttccgttctcttcgagtgtaccgtgacaataaatccgtcacttttgccgaacttgatgtgtttgatttgagtgaggcgttaagcgcacctgacgtcattttccattaaaacacagcgggcagtgatgcaactgcccgttatcaacacgacttaccagcggggaaagcgatgatcgtgcaaaaagagctggttgctatttacgattatgaggtccctgtacctgaagatccgttttccttcagacttgagatccataaatgctctgaattatttacaggttccgtctatcgactggagcgattccggctacgtccaacatttcatcaacgtgatcgagaagatgctgacccgctaataaatgatgcgttgatttatataagagatgagtgtattgatgagcggaaattacgaggtgaatcacctgaaactgtaatagcaatttttaatcgtgaactacagaatatattcaaccaagaaatagaataatatactctaaataattcaaattggtccgatccggcgcaacgtcccaatggcctggattataaatctcattatcttaattgcaacggggtccagccgtggttataattcgttcgttggaacacgatgttgcacaggctgtggtgttaggcctgaaaatagtaaataaaagaacctgcctcaccagcaggtttttttatttactgtgatctgctttccagatatttttcgctcaaacaactaatgcgccaaacatttattgcgcgtaaaatatcgtttatttcattaatacatttcagggatgaatatatgtcaccgcagaataatcatctgcagcgtccgcctgctgctgtgttatacgccgatgaactggcaaaattaaaacaaaatgataacgcaccttgcccgcccggttggcagttaagtttgcctgcggcccgtgcttttatccttggcgacgaagcgcaaaatatcagccgtaaagtggtgattagcccctccgctgtcgaacgtatgttagtcactcttgctaccggccgcggtttgatgttggtgggggaaccgggtaccgcaaaatctcttctttctgaattactggcaaccgctattagcggcgatgccgggttaaccatccagggcggggcatctaccaccgaagatcaaatcaagtatggctggaactacgccctgcttatcaatcatggtccgtcaacggaagcgctggtccctgccccgctttatcagggaatgcgcgacggcaaaatcgtccgtttcgaagagataacgcgtacaccgctggaagtgcaggactgtctgttaggtatgctttctgacagggtgatgacggggccggaactcactggtgaagccagtcagctctatgcgcgagaaggctttaatattattgccactgccaatacccgcgatcgcggcgtcaatgaaatgagtgctgcgctaaagcgtcgcttcgattttgaaacggtttttccgattatggatttcgcccaggagttggaactggtcgccagtgcttcggcgcgtttgctggcccatagcggtattccgcataaagtgcctgacgcggtactggaattactggtccgcaccttccgcgatctgcgtgccaacggcgaaaagaaaacgtcaatggatacactgacagcgattatgtccaccgctgaagccgtgaacgtggcccatgctgtgggcgtccgcgcctggtttttagcgaatcgcgcgggggagcctgccgacctggtggaatgtattgccggaaccatcgtcaaagataacgaagaagatcgcgcgcgtctgcgccgttacttcgaacagcgtgtcgccacacataaagaagctcactggcaggcttattatcaagcccgccaccgcctgccgtgaggaaagatgcatgagcgagccgttaattgtcggcatccggcatcatagtccggcctgcgcccggctggtgaaatcgttaatcgaaagccagcggccacgatacgtgttgattgaaggcccggctgattttaatgaccgggtagacgaactgtttttagcccaccagcttccggtagctatttacagttattgccagtatcaggacggtgcagcccccgggcgtggtgcctggacgccatttgctgaattttcgccggagtggcaggcgctacaagccgcacgtcgcattcaggcacaaacttacttcatcgatttgccttgctgggcgcagagtgaagaagaggacgattcgcctgatacgcaagatgaaagccaggccttactgctgcgtgccacccgcatggataacagcgataccctgtgggatcacttgttcgaagatgaaagccagcaaactgcattaccctctgcgctggcgcactattttgcccaactgcggggcgacgcctccggcgatgcgctcaatcgtcagcgcgaagcctttatggcccgctggattggatgggcgatgcagcaaaataatggcgacgtgttagttgtctgcggtggctggcacgctccggcactggcaaagatgtggcgcgaatgccctcagaaaattaacaagccagaattgccctcgctggcagatgccgttacaggttgttatctcacaccctacagtgaaaagcgccttgatgtgctggcaggatacctttcaggaatgcctgccccggtatggcaaaactggtgctggcagtggggcttgcagaaggccggtgaacaactgctaaaaactatccttacccgtttgcgccagcacaaattgcccgcttctaccgcggatatggctgccgctcatctgcatgcgatggcgctggcacagttgcgcggtcatacactaccgttacgcactgactggctggatgccatagcaggctcgctgattaaagaagccctgaacgcgccgttgccgtggagctatcgcggcgttattcatcccgataccgatccgattctgctaacgttgatagacacattagcgggtgacggattcggtaaacttgccccttctacgccacaaccgcctctgccaaaagatgtcacctgcgaactggaacgtaccgcaatctcccttccggcggagcttaccttaaatcgctttacccccgatgggctggcgcaaagtcaggtgttacatcggctggcaatactggagatccctgggattgtacgccagcagggaagtacactgacacttgcaggcaacggtgaagaacgctggaaattaacccgcccgcttagccagcatgcggcattgattgaggccgcctgttttggtgccacactccaggaagccgcacgcaataaattagaagccgatatgctggacgcgggcggaatcggcagtatcaccacatgtcttagccaggcggcgttagcgggtctggcgtccttcagtcaacaattactggagcaactcacactattaatcgcccaggaaaatcaatttgccgaaatgggccaggcgctggaagtgctttatgccttatggcggctggatgaaattagcggtatgcaaggcgcgcagatattacaaacgacgttatgcgcgactatcgatcgcacgctgtggctgtgtgaatctaacggcagaccggatgaaaaggagtttcacgctcacctgcatagctggcaagcgctttgccatattctgcgcgatctacatagcggcgttaatttacccggcgtttctctttctgcggcggtagccttactggagcgacgcagtcaggcaattcatgccccggcgctggatcgcggcgcggctcttggcgcactaatgcgtctggaacatcccaacgccagtgccgaagcggcgctgacgatgctggcgcagttatccccggcacaatctggtgaggcgctgcacggtttgctggcgctggcccgccatcaactggcctgtcagccggcatttatcgccggtttcagcagtcatttaaatcaactgagtgaagccgattttattaacgccctgcccgatttacgcgcggcgatggcctggctaccaccacgagaacgcgggacgctggcgcatcaggtgcttgagcattatcaactggcgcaacttcccgtttcggcgctgcaaatgccgttgcattgtccaccacaggccattgcacatcatcaacaactcgaacagcaggcactggcatcgctgcaaaactggggagttttccatgtctgaactgaacgatcttctgaccacccgtgagctacaacgctggcgattaattcttggcgaagcggcagaaacgacgctttgtgggctggatgacaacgcccggcagatagaccacgcgctggagtggctgtatgggcgcgatcctgaacggctccagcgtggtgaacgttccggtggattaggtggctcaaatctcaccacccctgagtggatcaacagtattcacacgctgtttccgcagcaggtgattgagcggctggaaagcgatgccgtgctgcgctacggcattgaagatgtggtgacgaatctcgacgtgctggaacgtatgcagccttctgaaagcctgctacgcgctgttttgcacaccaaacatctgatgaaccccgaagtactggctgccgcccgccggatagtgtgccaggttgttgaagaaattatggctcgactggcaaaggaagttcgtcaggctttttctggtgtccgcgatcgccgtcgccgttcatttattccactggcgcgaaactttgatttcaaaagtactctgcgcgccaacctgcaacactggcacccgcaacacggcaagttgtatatcgaatccccccgctttaacagccgcattaaacgccaaagcgaacaatggcaactggtcttactggttgatcaaagcggatcgatggtcgattcggtgatccactctgcggtgatggcggcctgtttgtggcagttacccggcattcgtacccatctggtggcgtttgacacaagcgtcgttgatctcacggcagacgttgccgatccggtagagttattaatgaaagtacagttgggcggcgggaccaatatcgccagtgccgtggagtatggtcggcaacttattgaacaaccagcgaaaagcgtcattatcctcgtgagcgatttttacgaagggggttcatcatcattactgacgcatcaggtgaaaaagtgtgtccagagcggcatcaaagtgctgggactggcagcgctcgatagcaccgcaacaccttgctatgaccgcgatacggcccaggcgctggttaatgtcggcgcacaaatagccgccatgacgccgggcgagctggcatcatggcttgcggagaatcttcagtcatgaattcactacgtccggaattattagaactgacaccgcaggccctgacggcgttaagcaatgccggttttgttaagcgcagtcttaaggaactggaaaatggcaacgtcccggagatcagccatgagaacgacgctttaatcgccaccttcagtgacggtgtccgtacccagctggcgaacggccaggcactgaaagaggctcagtgcagttgcggggccaacggtatgtgccgtcatcgcgtgatgctggtgttaagttatcaacgactttgtgccaccactcagtctacggaaaaagaagaagagtgggatccggcaatctggctggaagaactggctacccttcccgatgctacccgcaaacgcgcacaggcgctggtcgctaaaggcatcaccattgagttgttctgtgcgccgggtgaaattccctctgcccgcttaccgatgagcgatgtgcgtttttattcccgcagcagtattcgtttcgcccgttgtgattgtattgaaggcacactttgcgaacatgtcgtactggcggtacaggccttcgtcgaggccaaagcgcagcaagcagaatttaaccatttaatctggcagatgcgcagcgaacacgtcacatcatctgacgatccgtttgccagcgaagaaggcaacgcgtgtcgtcaatatgttcagcaattaagccagacattatggcttggcggcatcagccagccgctcatccattacgaggcagcattcaaccgcgcattgcaggcggcagagacctgcaactggcgctgggtgagtgaatcgctacggcaactgcgcgccagcgttgatgccttccacgcccgcgccagccactataatgccggagaatgcttacatcagcttgcggcattaaacagtcgattaaattgcgcacaagagatggcccggcgcgacagtattggtgaagttcctcctgtgccgtggcgcacggtcgttggctctggcattgccggagaagcaaagcttgatcatctgcggctggtgtctttaggtatgcgttgctggcaggatattgagcattatggtttacgcatctggtttaccgatcccgacaccggcagtattttgcacctttcgcgcagttggccgcgaagtgaacaggaaaactcaccggcagctacgcgtcggctgtttagttttcaggctggcgcactggcgggcgggcaaattgtttcacaagcagcaaaacgcagtgccgatggcgagctgctgttagctacccgcaaccgcttaagcagcgttgtgccgctgtcgcctgatgcctggcaaatgttgagcgcgccgttacgccagccgggcattgtggctttgcgggaatatttacgccagcgtccccccgcctgcatacggcctcttaatcaggtcgataacttatttattctgccggtcgctgagtgtatttcgctcggttgggacagcagccgccagacgctggatgcgcaggtcattagcggcgaaggggaagataatgtgctgacgttatcattaccagcctcagccagcgcaccttatgccgttgaacgcatggcggcgcttttgcaacaaacagacgaccccgtgtgtctggtttctggctttgtcagttttgttgaagggcaattgacactggaaccacgggtgatgatgacaaaaacccgtgcctgggcgctggacgcagaaactacgcctgtggcaccgctaccttctgccagcgttttgcctgtgccgtctactgctcatcagttgctgatacgctgccaggcgttacttattcaactgctccataacggctggcgctatcaggaacagagtgctattggtcaggcatagttgctggcgaatgacctcaccgcggtgggtttttatcggctggcacatgtgttgggacaatttcgtaatacagaaagcgaggcacgggtagaagcaatgaataacggtgttttgctttgcgaacaattattccccatgcttcagcaacaaggatgaaatagtgctttttactaagagttctactccagttccggactgctcacgccacggtattaggcatatcctatatagcccctggtgagagtcaccagttccttgattaaataaaatggagttttacatgaaggctttcaataagctgttttccctcgttgttgcatctgttctggttttctctcttgctggctgcggtgacaaagaagaatcgaagaaattcagcgccaatctgaacggcactgaaattgccattacctatgtctacaaaggtgacaaggtgcttaagcaatcttctgaaaccaaaattcaatttgcctccattggtgcaaccaccaaagaagatgctgccaagacacttgagccgttaagcgccaaatacaaaaacatcgcgggtgttgaagaaaaattaacctataccgatacctacgcgcaggaaaacgtgactatcgatatggaaaaagtggattttaaagccctgcagggtatttcaggaatcaacgtttctgctgaagatgccaaaaaaggtatcactatggcgcaaatggaactggtgatgaaagccgctggttttaaagaagtgaaataatcggttggcggtcatgctctaaacatgaccgccaattttttagccttttttcacatgctggcgcgctgccagtccacgcagaaaataacgtaaaaattgatcgccgcattcgcggaagtttttatgatccggtgcgcgcatcatcgctgtaatttccggcatcgaaacgcggaactgctgttcggtgaggatagccagaatgtcatcggttttcagcgaaaacgcgatgcgtaattttttcagcacgatgttgttattaatgcgacgttccggctccagtgccggagcagactcatccttgccgcgtttttcataaatcaggccattgaggaatgacgacaaaacaatgtccggacaacgctgaaaaccctcttcgtcttctttacgtagccagacggcgatctgttccgcggtggcttcgacattacccagcgccagaatacgcaccaggtcattattattggctttcaaaatgtagcgcacgctgcgcagaatatcgttacttagcatgaggccttcaggtgttgatgaggcaaaaagccattttagcagtcttttacaggccaatcgcctcttttaagcttttcagataacggcggctgaccggcacggttaagccattacgcaaaatcaactcggcctggccgttatcttccagacgaatctcctgtaaatgcgcgaggttaaccagatactgacgatggcagcgcagtagtggtgtacgactttccagggtacgtaatgtcaattcggtaaagccctctttcccttcgtggctggtaacgtagacaccgctcatccgactgctgacaaatgccacatctttcatttgcagcaaataaatccgactatgccccgtacaagggataaatttcagcgcctgttgattttccggtaacagcgaaacatcctgcttgctgcgctcctgacgcaatcgcgccagcgttttctccagtcgcgcttcatcaattggcttcagcagataatcaaaggcatgttcttcaaaggctttaattgcgtattcgtcaaacgcagtgagaaaaacaatatacgggcgatgttccgggtcaagcatccccaccatttccagaccactgatgcgcggcatctggatatcgagaaacagcacatccgggcgcagtttatgcaccgcgccgatcccttccacggcgtttgaacactctccaacgatttcaatatcgctctgctcctgcaaaaatacacgcaggttctcccgtgctaacggttcatcatcgacaattaagactttaatcatgcctcgtccctccatggtagtcgtaacgttattcgggtgtaactatcaggctcacaggcgacgcttattccatagtcatcgccaaaccgttcacgtaaacgcttatccaccagattcatccccagcccactggcattggttaccggttgatacaaaccggcattgtcttcgatctccagcatcaaatgttgcccctcacgtcgggcgctgattgccactcgccctgtatccagcagttgtgatgtcccatgtttaatggcgttttccactatcggttgcagggtaaacgcgggcaattgctgctgggataattcttgcggaatagcaatgttgacctgcaaccgcgactggaagcgcgccttttcaatttgcagataagcattcacatgttcaatttcgtcggcgagagtaacaaactccgaaggccgctttaagtttttgcggaaaaaagtggaaagatactgcaccagctggctggcctgttcgctgtcgcggcggatcaccgctttaatggtgttaagcgcattaaacaaaaaatggggattcacctgggcgtgaagcagtttgatctctgactgggtgagcatcgctttttgccgctcatattgcccggcaaggatctgcgccgaaagcaattgcgcaatcccctcacccaacgtgcggttgattgaactgaataaacggtttttggcttcatacaatttgatggtgcccatcacccgctgattttcaccacgcaacggaattaccagcgtcgaccccagtttgcattgcggatgcaaagagcaacggtaaggtacttcgttgccatcagcgtagaccacttcaccggtttcaatcgcttttaaagtataagttgaagaaatcggtttgccgggtaaatggtggtcgtcaccaattccggtaaaggccagcaatttctctcgatcggtaatcgcgactgcaccaatatccagttcctgatacagcacctgagccactttcatgctgttcacttcgttaaacccctggcgcaaaatgccttccgtcgaggctgccactttcagcgcagtggcagaaaaagccgaagtgtatttttcaaacatcgcgcgtttatcgagcaatatacgcataaacagcgccgcgccgacggtattggtgaccatcattggcgcagcaatattactcaccagacgcaccgcatcttcataaggtcgggcgatcgcaaggatgatcagcatttgcaccatttcagcgacgaacgtgacggcaccggcggtaatggggttaaagactttatcagtgcgcccgcggcggatcaggatgctgtgtaccaggccaccgagtaatccttcaacgatggtcgagatcatgcaacttaacgcggtcatgccccccatcgaatatcgatgtaagccgccggtcagcccaaccagcccaccgacgaccggaccgccgagtaagccgcccattaccgcgcctatcgcacgggtattggcaatagaatcgtcaatgtgcaacccaaaccaggtgcccatgatgcagaagatggaaaagacgatgtagcagagaaatttatgcggcagacgaaccgtgacctgcattaacggtatgaataatggcgttttactcattaaccatgcaatgactaaaaaaacgcacatctgctgaagcagcagcaacaccagattaaaatcgtacatacccgcaaaccacacttccctttaaaacgcgtaacatacattgcctgcgtttaactttctttgaactcttgcagaaaaatgagaattcgtgagtacgatcactcaaaatcgcctggcaaaaataaaatcaccctatagatgcacaaaaaacgggcaaaactacctggttcgcaaaactgcgtctaaagttaaaccgggacctcgcgagcaagggtgagacgatggcgctttacacaattggtgaagtggcgttgctttgtgatattaatcctgtcacgttacgcgcgtggcagaggcgttacggattgctgaaaccgcaacggacagacggcggtcatcggctgttcaacgatgccgatattgaccggatccgcgagatcaaacgctggatcgacaacggcgtgcaggtcagcaaagttaaaatgctgctcagtaatgaaaatgttgatgtgcagaacggctggcgcgatcagcaagaaacattactgacttacctgcaaagcggcaatctacatagcctgcgaacgtggatcaaagagcgcggtcaggattaccccgcccagacactcaccacacatctgtttattcctctgcgccgacggcttcagtgccaacaaccgactctccaggcgctgctggcgatcctcgacggcgtactgatcaactacatcgccatttgtctggcttcggcacgtaaaaaacagggtaaagatgcgctggtggttggctggaatattcaggataccacccgtctgtggctggagggctggattgccagtcaacaaggatggcgcattgatgtcctcgcccactcgctcaatcaactacgccctgaactattcgaaggccgtacattgctggtgtggtgcggtgaaaatcgaacctccgcccaacagcagcaactcaccagttggcaagaacaaggccatgatattttcccactcggcatttaatgattcgttaacaaatgcgctttactgtacaatcctttcgttaacataaggagtgcattatgcgcatagctaaaattggggtcatcgccctgttcctgtttatggcgttaggcggaattggtggcgtcatgctcgcaggttatacctttattttgcgtgctggctaagcgcctgcaccagcctttcaaacaggcggtctgcgatgatcgccgccagtgccaccagtaacgccccctggatcacatacgcggtattaaatccgctaagcccgatgatgatgggcgtacccagcgtgctggcccctaccgttgaggcgatcgtcgccgtaccaatgttgataatcaccgaagttcgcacgcccgccagaatcaccggagccgccagcggtagctcgaccttacgcactcgctgaccacgactcattcccatacctttcgcaacttctgtcacgctggcatcaatcgctcccagcccggcaagtgtcgcctgcaggacgggcagcacaccgtaaaggatcaaggcgataatcgctggttgcagaccaaagccgatcaccggaacggcgatcgccagcactgcgacgggcggaaaagtctgtccaacggcggcaatagtttccaccagtgggcgaaattccgcgccccacgggcgagtgacagcaattccggcaccagtgccaatgatcaccgcaaacaaactcgaaattcccaccagccagaaatgagccagtgccagagctgcaaaactttcttgctgataaacgggtcgtggcagttgtgggaacaaggcagcaaacagcggctggctgtaaggcagccagaaaatcagcgccacaaacagagcaatgagccagaacagcggatcgcgcaacatcttcatacgcttacgcctccaccagcagatcctgaaaatgcagcgtgccgcaaggctggccctgcatgttcaccaccggcagcacctcgcatccccgcgcaacaaacagagagagcgcatcgcgtagcgtcatctcttctgccagtgcctcaccatctgctcgttcttcgcgacgcacgtaatccgccacactacgtaacgaaagcaggcgcacacccagttcactacgtccaaaaaactggcggacaaaatcattcgccggacgagtcagcatcgtcagcggattgccctgctgcactacttcaccgtgatccatcaataccagatgttctgccagccgtagcgcctcatcaatatcatgagtgaccagcacaatggtacgccccagcaaacggtgaatgcgcgtcatctcttgttgcaacgcgccgcgcgttaccgggtccagtgcgccaaaaggttcatccattagtaagacttgcggatcggcagccagtgcacgcgccactcccacacgttgctgctgaccaccggaaagctgatgcggataacgctcacgcaaatttgactccagccccagtagcgccattaattcgtcgatacgatcgtcaatccgcgcccgcgaccatttttgtaattgcggcacggtagcgatgttttgcgccacgctccagtgggggaacaggccaatagattgaatggcatagcccatccggcggcgcaactccagtactggcagcgagcgaatttcttctccggcaaagcggatctctccgctgtcatgctccaccaggcggttaatcattttcagggtggtggatttgccggagccagatgtgccaatcagcaccgaaaaactcccttcctgaaaattgagattgagatcgttaacggctttttgtgcgccgaacagtttgctgacatggctaaattcaatcattacgtttcaccttcagcagtgcgataagcaaatcgaacagcgcgtcggtaagcaccgccagaacaattaccgggatcacccccagcaacactaaatcaatggcgctgcttagcagcccctggaaaaccagcgcaccaaaaccgcctgcgccgattaacgccgcaatcaccgccatacctacagtttgcaccatcaccacccgcaggctgcgcagaaataccggtaacgccagcggtaactgaacatgcaggaaacgctgcgccccgctcatccccatcgctctggcgctttccagcacatcgcgcgggatctggttcaaaccgactaccacgccgcgcaccagcggcagcaaggcatagagcaccagcgcaatcagtgcgggtgtcattccggttcctgctatgccgagcgtccccagccacggaaaggccgtaaccagcgcggcaagcggcgcaatcaacaggccaaagagcgccaccgaaggcacggtctgaatcacattgagcagagaaaaaattgccccctgccgagcagtggaaaagtagcaccagatgcccaacggcacaccaatcactaacgcaggcagcaccgcaccaaacagcaacgtcagatgttgtgccagcgcgtcgtcaaacacatcctgacggttggcgtattctttcattagtgagagatcgttaagcgtgccggagtacagcaaccacagcggaataatggcaatctgcatatgcaacaaccagcgccacagcggatgcgtggagattcggcggatggcatcgctacaggccagcaatgccagcgccgcagccagccagaaaccactgccgaggctggtacgcgccagcgcactgccattttgcgccagttgggtcgccgcctttccagctccccacaccagcaatacgaagacgaattgcgccagaatgagtgcacaaatgctgccttttttaccgggaataaaacaggccgtcagccaggcgcaaccaacgcccaccagcatccagatcgtttgcggccacagctgccagagatgacgcccctcacccgaaactaaacgattaggcgcgtaactgataaacggcagcgccgctgcgattgccgtcagcaacagcagcagcgccagaacaggattaatacggaaataagtcacgggaaattacttcgtccaccctttttgtttcaggtagtcggcagccacttttttggcatccagtccttccacagcaatgctggcattcagttgctgcaatgtttttgcatcgaggctggcgaagactggctgtagccactgtgccatttgcggatactccctcaacaccgactcacgcaccactggtgcaggcgcgtagataggttgcacaccttgcggatcgcttaaggtttgcagccccagcgccgctaccgggccgtcagtgccgtaagccattgcagcattaacgccagaggtttgctgggcagcggctttgatcgtcaccgccgtgtcgccaccagccagtgacagcaactgatcctgaccgagcttaaagccataggctttttcaaacgcgggtaacgcatcggcgcgttcgataaactctgccgaggctgccagtttgaaggtgccgccctcttgcagataacgactcaggtcggcaagcgaagtgagtttatttttctctgccacatcctgacgcacggcgatagtccaggtgttatttgcaggcgcgggcgtcagccagattaacttgttgtgctccgaatcgagctttttgactttctcgtaaccttgctgcgcgtttttccacgctgcatcgttttcatctttaaagaagaaagcgccattgccggtatattccggatagatatccagttcaccggaagtaatcgccccgcgcaccacaggagtcgttccgagttgcactttattcaccgtcggtacgccgtggctttccagcacctgcaaaatgatattgccgagtagcgcaccttcggtatcgatttttgaaccgactttaacgggggaagccgcctgtagcggcaggctcacggctgccaacataaccagtgaacctgcccagagctttaagagtggcatgatgctttcctcattcttttactgttgttttcagcgaattaagagaaaagcatagttgataatggcggggttagcttgagcggaaggattcagttgcagaatcagataaatacttaagaggcatattcggtccggcgtttcctgccggatgcggcgcgagcgccttatccggcctacaaagggcgcaaacgtcgcgcccttactaaagcattacagcaactcaaactcgcctttcttaacgcgtgcggaatcagtgccgataaagacattgaacttgccaggctcggcgtcatatttcatctgttgattccagaacttcagcgcctcaatatcgatcgggaagctgacagtctgagtttcgcccggtttcagggtgattttctcaaagcctttcagctgtttcacagggcgactcatggaagccgtcacatcctgcaagtacatctgcactaccgtggcaccctcgcgcttaccggtgttcgtcacctgcacgctggcagtcactttgccgtcacgcttcatggtcggcgcagaaagtttcacatcagagacggtgaaagtggtgtagctcagcccatagccgaacggatacaacgccccgttagcttcatcaaaataacgcgaagtgtatttgttcggcttgtcggcattatacgggcgaccggtattcagatggctgtagtacaccgggatctgcccgacagaacgcgggaaggacattggcagcttgccggacgggttgtaatcgccaaacaatacatcggcaattgcattaccgccttcagtccccgcaaaccaggtttccagaatcgcatcagcctgctgatcttctttcaccagcgccagcggacgcccgttcatcagcaccagcaccagcggtttaccggtggctttcagcgccgcaatcaagtcacgttggctttgcggaatagtgatatcggtccggctggaggcttcgtgcgccatcccctgtgcttcaccgactacagccaccaccacatcagattgtttcgccgtctgcaccgcttcatcaatcatctcttgcggcgaacgcggatcgactttgaccgcttcttcatactgattcaggaaatcgataatgcctttgtcactggtaacgttcgcccctttggcatacagcactttaccgttttcaccgacggcatttttaatcccggtcagtacggtcacggattgatcggcaacaccggctgcggaccagctgcccatcacgtcacgtttactgtccgccagtggcccaaccaccgcaatggtggccgattttttcagcggtaacgtttcgagacggtttttcagcaacaccaagctttcgcgcgccacttcacgcgcttctttacggtgcaggcggctttcggcattggtatccaccgggtcagactctttcggccccaaatggctgtatgggtcgttaaacaaccccatatcatatttaacgttcagtacatggcgggcagcatcgtccagctctgccatcgtcactttgccggatttaatcaacccaggcagatacttcgagtagtactcgtcgctcatgctcatgttgattccggatttcagcgccacgcgcaccgcatcttccgggtctgccgccgtgccatgtttaatcagctctttgattgcaccgtgatcggaaacggtgatgcctttaaagccccactggtcgcgcagaacatctttcagcagccaggaatcggaggtggctggcgtgccgttcagcgagttcagcgccaccatcaccgcgccgctgcctgcgtccagccccgctttgtacggcggcatataatcattaaacaggcgctgcggactcatatcgacggtgttgtactctttaccgccttctaccgcgccgtatgcggcaaagtgtttgacgctggtcatcaccgagtagcgatctgccgggcttttaccctgcatcgcttccaccatggttttacccattgttgaggtgagatacgtatcttcgccaaaaccttcggaagcacgtccccagcgcggatcgcgcgagacatcgaccatcggtgcccaggtcatattcaggccatcatctgccgcttcataagcagagacacgtccgaccgttttcactgcatcgaggttaaaagacgaggccagaccgaggctaatcgggaacaccgtgcgctgaccgtgcagcacgtcgtaagcaaagaaaagaggaattttcaggcggcttaattccatcacctgatcctgcatggcgcggatatcctgacgggttacggtgttgaaaatcgccccaacctgaccgtctttgatcatctcgcggatcgcctctttcgggttatccgggccgacgctgattaagcgcagctgaccaattttctcatcaactgtcattttcttaagcagttcggtgacgaacgcatcccgcgcttcgggcgttaatggatggttgccgaataaatcatccgccagtgctggctgcagggccagactcaccgcgattcctactgaacatagccatttcatatggatttttcttcctttgttgcccgacgtggcagcgaaaatggtgcaaaaaccgtagtttgccataagcatgatggagagagaaaaagaatgctcagtttattgtctgaattttcaaaatattcactcgctgaattgttatacaaggcgctattctagtttgtgatattttttcgccaccacaaggagtggaaaatgtcttccatgacaacaactgataataaagcctttttgaatgaacttgctcgtctggtgggttcttcacacctgctcaccgatcccgcaaaaacggcccgctatcgcaagggcttccgttctggtcagggcgacgcgctggctgtcgttttccctggctcactactagaattgtggcgggtgctgaaagcctgcgtcaccgccgacaaaattattctgatgcaggccgccaatacaggcctgaccgaaggatcgacgccaaacggtaacgattatgatcgcgatgtcgttatcatcagcaccctgcgtctcgacaagctgcacgttcttggcaagggcgaacaggtgctggcctatccgggcaccacgctctattcgctggaaaaagccctcaaaccgctgggacgcgaaccgcactcagtgattggatcatcgtgtataggcgcatcggtcatcggcggtatttgtaacaactccggcggctcgctggtgcaacgtggcccggcgtataccgaaatgtcgttattcgcgcgtataaatgaagacggcaaactgacgctggtgaaccatctggggattgatctgggcgaaacgccggagcagatccttagcaagctggatgatgatcgcatcaaagatgacgatgtgcgtcacgatggtcgtcacgcccacgattatgactatgtccaccgcgttcgtgatattgaagccgacacgcccgcacgttataacgccgatcctgatcggttatttgaatcttctggttgcgccgggaagctggcggtctttgcagtacgtcttgataccttcgaagcggaaaaaaatcagcaggtgttttatatcggcaccaaccagccggaagtgctgaccgaaatccgccgtcatattctggctaacttcgaaaatctgccggttgccggggaatatatgcaccgggatatctacgatattgcggaaaaatacggcaaagacaccttcctgatgattgataagttaggcaccgacaagatgccgttcttctttaatctcaagggacgcaccgatgcgatgctggagaaagtgaaattcttccgtccgcattttactgaccgtgcgatgcaaaaattcggtcacctgttccccagccatttaccgccgcgcatgaaaaactggcgcgataaatacgagcatcatctgctgttaaaaatggcgggcgatggcgtgggcgaagccaaatcgtggctggtggattatttcaaacaggccgaaggcgatttctttgtctgtacgccggaggaaggcagcaaagcgtttttacaccgtttcgccgctgcgggcgcagcaattcgttatcaggcggtgcattccgatgaagtcgaagacattctggcgttggatatcgctctgcggcgtaacgacaccgagtggtatgagcatttaccgccggagatcgacagccagctggtgcacaagctctattacggccattttatgtgctatgtcttccatcaggattacatagtgaaaaaaggcgtggatgtgcatgcgttaaaagaacagatgctggaactgctacagcagcgcggcgcgcagtaccctgccgagcataacgtcggtcatttgtataaagcaccggagacgttgcagaagttctatcgcgagaacgatccgaccaacagcatgaatccggggatcggtaaaaccagtaaacggaaaaactggcaggaagtggagtaaaaattacggatggcagagtatcgccatccgaattcacttaatcgttctgtgccgtctgccccgccgccgccatttgggcggctttttgttttttatagctcaacgctgctgccggcacaggcatcactttaccggtttcaatccaggtacgcaggcggctggcatcggcaaaatgggtatatttgccaaacgcgtccatcactaccagcgccaccggtttattattgataaccgtacgcatcaccagacaatggcccgccgcattggtaaagccggttttggttaactgaatattccagttatcgcgatacaccagatgattagtattgcggaacggcagcgtatacgtcggattagagaaggttgccatatcttcccgggtagtacttaactgcccgatcaacggatattgtttgctggcaatgagcagtttggttaagtcacgggcagttgaaacgttatgcaccgacaatccggtaggttcaacaaagcgcgtgttgttcattccgagcgatttcgctttcgcattcattgccttaataaaggctttgtaaccaccgggataatggtgcgcaaggcttgccgccgcgcggttttctgaagacatcagcgccagcaacagcatatctttacggctgatttcgctattcagtcgtacgcgcgaatagacccctttcatctccggcgtctggctgatatccacttttagtttttcatccagcggcagtcgtgcatccagcacaaccatcgcggtcattaatttgctgatagacgcaatcggacgcaccagatccgggtggttcgaatagatcactttgttggtattcagatcaacaatcatcgcgctaccggaggcaatttccggttgtgaagcggtggtagcggctgccgttttcgcaacggcctgcggtgcaaaaggcacagccagcatcagggccaggctaaataaagaaactcgaaatttcggcatgatgagcattcagatagtggttcacgcgcacgggttgcgcaccgccggagtaaggatttactgaggctagcgacgccatcataacgagcaaaaagtgcgatcgtcaaaggagaatcgtgaggaaatgctgcattgctgacatttacgccagcaatgcaacgtcaaagaactttctagaacaaacgataaccgtagccccatagtataacggttagggcgagcagcacttccagtaccagcacgccaatcgccagcgtcgaactagagaagctaaggccttcctctttgttgatattcaggaagctcggaataccaaggtaaagcaggtagccggtgtaaaacagcgccaccgtgccgaccagcgcacacaaccagaccagtggataaagcgccaccagaccgcttaaaaacagcggagttgcaacgtagcccgcgaagaccatgcagtgcgcaagtgacggacgctgcggataattacgcgccatccaccagatgacccgccccatcaccgcgaccccagccagcataacgccgtaaaacaagacagccagcgccagtccggtaaaccaggataacttcaggatagtgccatcgccaaaattccagccaatctgtgtagtgccaatgaaggcgcaaatcaccggaatcgccgccatcagcaaaacgtggtgggtgtaatggtgagaaatcgtttcgttttcgcgattaatcacctgcatttcacgatcgggatgggaaaacagtccccagacatggctcataccgcccccttgttgtgagttcatgaacctgacagttcaagtataagtcagcttgtgattattttttgttcgcccatgtaattttcactgtctgatgaacgtcctttttcagcgtgaatgattcacagggtgtatgcttactggcaaccaaagggagacagactggcctatggatctcaatacacttatctcacaatatggttatgccgcgctggtgatcggtagcctggcggaaggtgaaaccgtgactttgctgggaggcgttgcggcgcatcaggggctattaaagttcccgctggtggtactttctgtggcgcttggcggcatgattggcgaccaggtgctctatctgtgcgggcggcggtttggcggcaagctgttacgccgtttctcgaaacatcaggataaaattgagcgggcgcagaaacttatccaacgccatccgtatctgtttgtcattggtacgcgctttatgtatggctttcgggtgattggcccgacgctgattggtgccagccagctgccgccgaaaatctttctgccgctgaatattctcggcgcatttgcctgggcgttgatttttaccactattggttacgctggtggtcaggtgattgcgccgtggttgcacaatctcgaccagcatttgaagcactgggtctggttgattctggtcgtggttctggtggtgggcgtgcgctggtggctgaaacgacgcgggaagaaaaagccggatcatcaggcgtaaaaccattgccctggataaggcgttcgcgccgcatccgacatccggagtaccatgcctgatacgacgcttgtgcgtcttttcatgccgaccaaaatattacccaatgaaatatccacgcacctcactgcgctattctgggttgaactgtggattcgccaacataaagccgccatccactatcaacgactgcccggtggtgtaatttgcgccctccgaacaaagccacaccaccaggctggcaatctcatgcgttgcgccaaaacgccgcaagggaatcgaaggctccgcgtcgggcttcacgtcgctgtcatccatgccattcattggcgtggcgatcgccccaggcgcgactgcgttcaccaaaatcttatgcctgaccagctccagcgccatcgctttggttaacccaccgagcgcatgtttagcggctgtgtaggcgctggcatccggcagcggcgtatgttcatgtaccgacgtaatgttgatgatgcgaccgccctgcccttgtttcaccatctgacgagccgcaatttgcgagcataagaatgcaccatcgacatcaacggtaaaaatcttgcgccactcatcaaaagccatatcaagaaacggcgctttggtcattgcacccgcattattcaccagcacatcaatgcgccccagccgttgaatgagtttctccagcgccagtgccccttctggtagattgccgagatccagctgcacgatctccgcacgtacgccgtggctaactacctcacgcgcggtatcttttgccccttcttcatctgagtgccaggtaataccaatatcaaacccctgctgcgccagtaataacgcgcactctttgccgatccccgaatcggaggcggtaataatcgcaacctgtgccatcgagttctccacttaacgctgaataaacgttaagtatagaaggcgcatatcatcagcgtttgtaccccccgcccaacgcaccagtgagttgaatggaggcatccagccactgcccttgcaataacaggccattggcccgctcacgcagcgcggggattctggcttcgctgacgcgggaaccagcaatgatgcccgcgttaaagcgcgcctgcgcaagacctaccacacgcaaggcatcgcgctcaatttgcgcctgatgctggtttttctccgccagtgtctgaacctgactggctgcccgcgccacgtcattcaccgcttcaaccaccgctttgttgtagctggcgatagacaagttgctttcggcttttgcgatatcgagattggcgttaagacgaccactatcgaaaatgggtagcgtcaggcctgccgtaacgcccatttgctgcgcggaatgacggaacagatcgcttaagtgcaacgcatcctgttgcaggaaggccatcaggttgatgtcaggataaaatgccgcttttgccgcatcaatggtgcttagcgatgactcaacgtaccagtgcgccgcctgcaaatctgcccgccgggccagtaaggagtaccccagttcatcaggaagctggcttgccactttcggcaacgcgaccggtttaagcttcaatgactttgtctggttatttgtaagtgcgcttaaccgtgcctcaataattttcattttccccgcgacatcgttgagctgctgccgggttttgctggcattaatatcggtttccacaccttcaactgaagaagtaatcccgttctgatatagctggcgatcggtcgcgataatggtgttctgctctttttctatttgctgcaagaccgtgtttaacgccgcctgggtttgccactcccagtacaggcgggctacgctgccagccagcaattggcgggtttgctcgcgttccgccgcccgtgctttaaccgtacccaggcgggcagtaacctccgcccgattctttccccagatatcgagatgccagcccgccgttaagccaaaagtaccgttggtgtaccacgggccggtcgtacctgcggccggatcgttcagagcaaacggccccattaagccttctgccgacattttttgccgctccatatccgccgaaaagtcgatctgcggaccatcctgagtggcaactgccttcgcctgggcttcagctagctgaatgcgctgttcagccacctgcatatccggtgcgttctgtagtgcattgttaattaaggaagtgagttgattatcgtgatactccagccaccattggctgtctggccaaccattttcagcgccgtgggtaatgcggtgtcaacttgtgcagcgggcgtttgctggcttaacgcctggcgggtttcatgcataggcgcacacccggccagcatcagtaacagcggaaaacaggcgatggctggataaaaggaatcacgattcatgggggaataatcaggtaagaaaaggtgcgcggagattaccgtgtgttgcgatatattttttagtttcgcgtggcaatacatcagtggcaataaaacgacatatccagaaaaatatacactaagtgaatgatatcttccgatttatcttaatcgtttatggataacggcaaagggcttcgttttttcctatacttattcagcactcacaaataaaggaacgccaatgaaaattatactctgggctgtattgattattttcctgattgggctactggtggtgactggcgtatttaagatgatattttaaaattaattaatgtcatcaggtccgaaaataacgagaatatttcagtctctcatcctgttgcgctcctgtcatgtgcattgcttcatataatcactggcgcaaggagcgcgcagggggcggccaatcgccgccgccccctgcacccccgggctctggcgaacaaaatcgccgctgcgcggtgccctcggcttatcccttacggctaccgggtcgggcgcgaggtaacatccctgtaaaacgcgccctcagcccacatccatgtgggctgccccggccttcagggaacgcctcggcaattttgacgccaccaaacaaccgtgcggcctattgataaagagctaacacattgtcaaaaaacatcactatggttttttagagtttctcgatatcaattgcctgaatagcccttgcaatatcaggggaattattcaacacccgaacatgctgaaataattccgttgcttcatcgtattctttacgcaaataactcaaccactgtttaatccgcgcaacgtgatataacccggtatcgccctgcttttccagacgggtatatttttgcagcaaagcaaccacctccggccacggcattcgcggttcgttatattttaccacccggctcaggttgggaatattgagcgccccgcgaccaatcatcactgcgtcgcagccgctgatcgccatgcattgttgcgcgctctgccagtcccagatttcaccgttggcaatcaccggaatattcagccgctggcgaatatcgccaatcgcctgccagtcaatatgctccgcgcggtaaccctgctctttcgtccgcccatgcaccaccagctccgtagcgccagcctgttgaaccgcatcggcgatttcaaatttcttctcaccgctgtcccagcccagacgcactttcacgctgacgggcaaatgcgccggtacagcttcacgcatcgcttttgcaccctggtagatgagttcaggatctttgagtaacgtcgccccgccgccgctaccgttaaccgttttcgacgggcagccgcaattgagatccacgccccaggaacctaactccaccgcacgggcggcgttctctgccagccattgtgggaactgacctaacaactgcacgcgcaccagcgtaccagatggtgtccggctggcgttttgtagctcagggcaaatgcgatgaaagacttttaccggcagcagttgatccaccacgcggacaaactcggtgatgcacagatcgtagtcgttaacttcggtcagcaattcacgcaccagagagtcaagcactccctccatcggtgccagtaacacacgcatatcatcacccgcaaaaaaatgaggcgctatgttagcgcctatggtcagcggattaaaggtctgcaaagagggattgctgcaaactgcaatccctctctatgcttgatgtatgcctgagttcgctgcgcattgcgtaatgccggggagcgaaaaaataagcgctgatttcttaatgtgatcggtagcacgttttacgaattaattgtatgatgaatccatctcatctggggtgttgattatgagtaagacactgaacattatctggcaatatttacgcgctttcgtcctgatttatgcctgcctgtatgcaggcattttcattgcttccctgctaccggtaaccattccgggcagcatcatcgggatgctgatcctgtttgtcctgctggccttgcaaattcttccggcaaaatgggtcaatccggggtgctacgtactgattcgctatatggcgctattgtttgtgccgattggcgtaggcgtcatgcaatattttgatttgctccgcgcacagtttggcccggtagtggtttcctgtgcagtcagtacgctggtggtttttctggtggtgagctggagttcgcaactggtacacggtgaacgtaaagtcgtaggtcagaaaggatcagaagaatgatggcgaatatctggtggtcattaccgctgacattgattgtcttttttgccgcccgcaaactggcggcacggtataagtttcccttgcttaacccgttgctggtagcaatggtggtgatcattccttttttaatgctgactggcatctcttacgacagctactttaaaggtagcgaagtgctaaacgatctgctgcaaccggcggtcgtcgcgctggcctatcctttatatgagcagctacaccagatccgcgcgcgctggaaatcgatcatcaccatctgttttatcggcagcgtggttgcgatggtgacggggacttccgtggcattgttgatgggcgcttcaccggaaatcgccgcgtcaatcctgccgaaatcagtcaccacgcctattgcaatggcggttggcggcagtattggcggtattccggcaatcagcgcagtttgcgtgattttcgtcggcatcctcggcgcggtatttggccatacattgcttaatgcgatgcgtattcgtaccaaagctgcgcgcggtctggcaatggggactgcctcgcacgccctcggtacggcgcgctgcgccgagctggattatcaggaaggtgcatttagttcgctagcgctggtgttatgcgggataattacttcgctgatcgcaccgttccttttcccgattattctggcagtaatgggctaaaatttgcgatgcgtcgcgcatttttgatgtatgtttcacgcgttgcataattaatgagattcagatcacatataaagccacaacgggttcgtaaactgttatcccattacatgattatgaggcaacgccatgcatccacgttttcaaaccgcttttgcccaacttgcggataacttgcaatctgcactggaacctattctggcagacaagtacttccccgctttgttgaccggggagcaagtctcatcgctgaagagcgcaacggggctggacgaagacgcgctggcattcgcactacttccgctggcggcggcctgtgcgcgtacgccattgtcgaattttaatgttggcgcaattgcgcgcggtgtgagcggaacctggtatttcggtgccaatatggaatttattggtgcgacaatgcagcaaaccgttcatgccgaacaaagcgcgatcagccacgcctggttgagtggtgaaaaagcgcttgcagccatcaccgttaactacacgccttgtggtcactgccgtcagtttatgaatgaactgaacagcggtctggatctgcgtattcatctgccgggccgcgaggcacacgcgctgcgtgactatctgccagatgcctttgggccgaaagatctggagattaaaacgctgctgatggacgaacaggatcacggctatgcgctgacgggtgatgcgctttctcaggcagcgattgcggcggcaaaccgttcgcacatgccttacagtaagtcgccaagcggtgtcgcgctggaatgtaaagacggtcgtattttcagtggcagctacgctgaaaacgccgcattcaacccgactctgccaccgttgcagggagcgttaattctgttgaatctcaagggttatgattacccggatatccagcgcgcggttctggcagaaaaagccgatgcgccgttgattcagtgggatgccacctccgcaacgctgaaagctctcggctgtcacagtatcgaccgagtgcttctcgcttaagcctggtgccggatgcggcgtgaacgccttgtccggcttgccagccctctcctggtgtcgaaattcccggcaaacagtttgccgtttcttgcgcaaaaccagcgggtaaagtagcctgatggaaattttccttagatcgagtctcctgcatgttaaagcgcgtgttcctcagcctgttagtcctgatcggcttgctgctgttgactgtgctcggcctcgatcgctggatgagctggaaaaccgcgccttatatctacgacgaattgcaggatctcccctaccgccaggtcggtgtggtgctcggaacagcaaaatattatcgtactggcgtaattaatcagtattatcgctaccgcattcaaggagcgattaatgcctataacagcggtaaggtaaattatctattactgagcggcgataacgcattgcaaagttataatgagccgatgaccatgcgcaaagatttaatcgctgctggtgtcgacccatcagatattgttctcgattacgcaggctttcgtacgctggattccatcgtgcgtacacgcaaagttttcgatactaatgatttcattattatcacccaacgtttccactgtgagcgagcattatttattgcgctgcatatggggattcaggctcagtgttatgccgtaccgtcaccgaaagatatgctgtcagtacgtattcgtgaatttgccgcccgtttcggtgcgctggctgacctttatatttttaaacgtgaaccgcgttttttagggccgctggtccctattccggctatgcaccaggtaccggaagatgcgcaggggtatcccgccgtcacacccgaacagttacttgaattacaaaagaaacaaggaaagtagttatggatgtacagcagttttttgtcgttgccgtttttttccttatcccgatattttgtttccgcgaagcatggaaaggctggcgcgcaggcgcgattgataaacgggttaaaaatgcaccggaaccggtgtatgtctggcgagcaaaaaatcccggactctttttcgcttatatggtggcatatatcggcttcggaattttatctatcggcatgattgtttatcttattttctatcgttaatattcccctctccagttaattattgagaataattattacttcacctgataagctgcggatatcacattcctaaccgcagctatttgtgaatcttttcacagtttaaattcccccgcacgcttagccttaatatcagtacattattatttactaaacgctcgccttaattacctatagcattaaggaagatcacatgccgcaacaaaattatctggatgaactcactccggcttttacgtctttactggcgattaaagaagcctctcgctgtttattatgtcacgacgctccctgtagtcaggcttgcccggcacagaccgatccggggaaatttattcgctcaatctactttcgtaattttaaaggcgctgccgagacaattcgcgaaaataatgccctcggtgccgtttgtgccagagtgtgcccgacggagaaattatgccaaagcggttgtacccgtgccggtgttgatgctcccattgatatcggccgcttacagcgttttgttactgattttgaacaacaaaccggaatggaaatttatcagcccggtactaaaacgctcggcaaagtcgcgattattggcgcaggtcctgccggattgcaggccagtgtgacactgacaaaccagggttatgacgtcacgatttatgagaaagaagcgcaccccggtggctggttgcgtaacggtattccgcaattccggttaccgcaatcagtgctggatgcagagatcgcccgtattgaaaaaatgggcgtgaccattaagtgcaacaacgaagtcggtaacacactcacccttgagcagctgaaagcagaaaaccgcgcggtactggtcaccgtggggttatcaagcggttccgggctaccgctgtttgagcatagtgacgttgagattgccgtcgacttcttgcaacgtgcacgacaggcgcaaggcgatatcagcattccacaaagcgcattaattatcggcggcggtgatgtcgcgatggacgtagccagcacgctgaaagttctcggctgtcaggcggtaacttgcgtagcgcgtgaagagttagatgagtttccggcaagcgaaaaagagtttaccagcgcccgggagctgggcgtttcgatcatcgatggattcacgccagtagccgtggaaggcaataaagtcacgtttaagcatgtacggttatcgggcgaactgacgatggcggcagataaaattattctcgccgtcggtcagcatgccagactagatgcctttgcggagttagagccgcagcgtaacaccatcaaaacacaaaattaccagacccgcgacccgcaagtctttgctgctggcgatattgttgagggtgacaaaaccgtggtctatgccgtgaaaaccgggaaagaagccgccgaggcgattcatcactatttagagggagcttgctcatgttaacgaaagatctttcgattactttttgcggcgtgaagtttcccaacccgttctgcctctcttcttcgccggtaggcaactgctatgagatgtgtgccaaagcctacgacacaggttggggcggtgtggtgtttaaaacgatcggcttttttatcgccaacgaagtctcgccgcgttttgatcatctggtgaaagaagataccggttttatcggcttcaaaaatatggagcagattgctgaacatccgttggaagagaatctggccgccctgcgtcggctgaaggaagattacccggacaaagtattgatcgcttcgatcatgggggaaaatgagcagcaatgggaggagctggcgcgcctggtgcaagaagctggcgcggatatgatcgagtgtaacttctcctgtccgcaaatgacttctcatgcgatgggtagcgatgtcgggcaaagcccggagctggtagaaaaatattgtcgggcagtgaaacggggttccacgctgccaatgctggcgaagatgacgccgaatatcggtgatatgtgcgaagtggcgctggcggcgaagcgcggcggcgcagatggcattgcggcgattaacaccgttaaatccatcaccaatatcgatcttaatcagaaaatcggtatgccgatcgttaacggaaaatcgagtatttccggatattccggtaaagcggtaaaaccgatcgccctgcgcttcattcagcaaatgcgcacccatccagaactgcgcgatttcccaatcagcggtatcggcggcattgaaacctgggaggatgcggctgagtttttattgctcggcgcagcaacgttacaggtgaccaccggcatcatgcagtacgggtatcggatagtggaagatatggcaagcgggttgtcgcattatctcgccgatcagggatttgattcgctgcaggagatggtaggtctggcgaataacaatattgtcccggcggaagatttagaccgcagttatattgtctatccccgtatcaatcttgataaatgtgttggctgtggacgctgttatatttcctgttacgacggcggtcaccaggcgatggaatggagcgagaaaacccgcacaccgcattgtaataccgagaaatgtgtgggttgtctgctttgtggtcacgtctgcccggtgggttgtattgagctcggggaagtgaagtttaagaaaggcgagaaagaacacccggtaacgttgtaaaaccagagacgcatccggcatttggttcctgtcgccggatgcggcttgaacgccttatccggcctacaaaaccatacaaatcagtatgttgagcttattgtaggccggataaaacgcgccagcgttgcatccggcatttggctcctgttgccggatgcggcgtgaacgccttatccggcctacaaaaccacacagatcatgatgttatgtgcgtttatgaccgaatgcggaccacattcacatcatttcttacgcgcgtatttcagtgaatccagcgctacggcgaagataataatcgcccctttgatgatgtactgccagtatgggtttacgccgatatacgtcaggccatagttgatgacggtaaaaataattaccccggtcaccacgccaatcaccgtccccacaccgccgctgaacgatacaccgcctaccacgcacgccgcgatagcatccagctcatacataaagccgaggttgttggtggcagagccgatacgtccggcttctaacatcccgccaaaggcatagaacacgccagacaacgcgtagatcatcagcaggttcaggccgacgttgacaccagatacttttgccgcttccgggttaccgccaatggcaaaaatgttcttaccgaagcgggttttgttccacaacacccagacgaacgccaccgcaatcaacgcgtagaaggtgatgtaagagagacggaaactccccagcgcgacaaagccctgagcaaaggtagagaagccactgtcaaaaccagaaattggcgacgccccgacaaagtcgtaatagagcgagttgatgccatagacgatgatcatcgtgccgagcgtggtaatgaacggcgtcacgttgagataagcgataatcagaccgttgatcaaaccgatcaccgcaccaatggcacagacaatcagaataaccagcgcaatcggcatcgtcgccatttccgggaacactttgttggcgttatccatggactgcaataatgtcgcagccaccactgccgccagccctacctgacgaccagcagaaagatcggtcccctgggtgacaattaaccctgccacaccgagcgcgataataatacgcaccgatgactgggtgagaatattacttaagttcaacagacttaaaaatgttgggtcctggaaaataataatcgccagcaaaactaaaagaacgacgtaaataccgccctctttcaggtaagtaagaaaacttttcttatttaacgcactcatgggaagcccctaatcttaaaggtgcaaagacgcaagacgcagaatttcgttttgcgttgttgtttttgtatcgacaattccggaaacgagaccattgctcatgaccagaatacggtctgttatccctaacaactcaggcatttcagaggagataataataatccccttgcctttcttcgccagttcggcaattaactgataaatttcaaacttcgccccgacatcaataccgcgcgtcggttcatcgagcattaatatttctggttgcgttagtagccagcgaccaataatcaccttttgctgattaccaccggagagcgaaccaatttgcgtccgatgacccggcgtttttacccgcatcgaatcaatcacccactgggtatcgcttttcatccgcgagttatccagtaaaccaactttatttttgtagttgcgaatattggaaattaacgagttaaaaccaatatccagataggcataaattcccgttgagcggcgctcctcagttaccagtgcaaatccatggtttatggcttcgttggcattatggttattgatctgtttgccgtgcaacgttatggtgccagccgatttctcgcgaataccaaataacgtctcaacaatatcggtacgtttcgcccccaccagaccggcaataccgaggatctcccctttatgcagatcaaacgagacatcgcgaatcgacggctggcgcagtgacgtcaggttacgtacctcgaggatgacttcgcccggtttgttttctttgtcagggaaacgctggttaagagaacgcccaaccatcatggcgatgatcttgtccatcgtcagtcctgccagcggttcggtggcgatccactgaccgtcgcgcaatacggtaacttcatcacataactggaagatttcttccattttatgcgagatataaacaataccgcagccgcgctcttttaatttacgaataatagtgaacagatgattgacctctttttcggttaacgaagaagtcggttcatccataatcacaattttcgcgttataggaaaacgctttggcgatttcgatcatctgcatttgcgaaacggataatgtgccgacgcgcgcacgcggatcgatatcaatatccagttcgtcaaaaatcgctttggtttcgcggtacattttgtcctgatcgacaaacatgcctttggtgggatatcgccccagccacatgttatccatcaccgaacgttgtaataccaggtttaactcctggtgtaccatcgaaataccattttccagggcttcttttgcagaatggaaatcgatctctttaccctggaataaaatggtgccggagtctttttgataaataccaaacaggcattttaataatgtcgattttcctgcaccgttttcccccattaatgcatggatagaatgtggccggacttttaaattaacgttatcaagtgccttaacaccaggaaaggacttgttgataccgctcatttccaacaagtattccccggaggacggagtcgttgagctgaccatataattttaccttgttggccatacaataagggcgcagtaatagactgcgcccaatcagtcttatttcttgctgaattcagccaggttgtctttatctacgccaacataaggtacgcggaccactttgttgtcgattttccagttggtgccatcagccgcacctttaccatcggccaggtttttcgccagatcaaaggtcgctttcgcctggttgttagcatcgttcagtacggtgcccgccagtgcaccggatttcaccagcgccagcgcttctggcagcgcatcgacgccaaacaccggaatgctggacttgttgtgtgctttcagcgcttcaaccgcgcccattgccatcgcatcgttgttggcgataaccacttcgattttgttggcgttcgggccagacagccaggcgtccatcttatctttcgcctgagcggtgtcccacattgcggtatctaactgtaactgttcagttttgatgcctttatcgttcaattctttaatcacgtaagtggtacgtgcttctgcatccggatggcccggttcacctttcagcagtacgaactgaatctgaccgtctttgttcagatcccaaccctgattcgccgcccagtgtttagcaatcaaatcgccttgaataatgccggactctttggagtcagtgccaacgtagtaggctttgtcgtagctatccagcgccttacgagacggttctttgttgaagaaaaccaccggcacgttttgcccacgcgctttctcaatcaccgtacccgcagctgccgggtcaaccaggttgattgccagtgccttcacccctttcgccagcaatacgtcgatctgatcgttctgcttggactggtcattctgagaatcattcatcagcagctgaacatctggcgcggctttcgcatcttgctcaatagccttgcgcactacagacataaagttatcgtcgtacttatagattgttacaccaatgcgagtatcagcagcgtgtgcagcggcaccgaataacatgctggccatcacagcagacagggttaacaccttcttattcatggtatctccggtttttcttatgcagggtagtgcttgagataaatgctcggcggggcagtagagttaatgaagtgttactgaacgccgaagctcactttttaaaattcgttcttccatgcccggtaacgctccagaaaacggctttaattgttgttatgacgctgttacctcggcaaaagtgattattcactgttacatacgggttacaacgttaaaacggtgcaatcatagctatcacattgttaagatactgtgaaatcactcacagattgaaagcggttacatcgcctgatttgttgagttagtgatcgccgccgcattctggcgtgttgcgacagaatggcgacgcactaacgtcggcataaaacagtggctggcacgaggatcaatattgcctgctgccccctgcaaggccagttcggtggctaatttcgccattgaagcaatgggataacgcacggtcgttaattgcgggtcggtgtaacgggcgatgggaatatcatcgaaaccgatgattgagagatgtaacggaatcgcaatgccattatcttttaatgctgtcagtgcgccagcggccatattgtcgttataagcaaatacagcggtaagttgtagattgcgccccagcagttcaaccatcgccgcctcaccgcccggcatgtccggcgtaccagcgccaatccagctttccggcggaataatatcctgctctttcaacgcactcatccagcctgctttacgcatggcgtcatcttcaatgccgtggctggaagaaagataaccaatacgttgatgaccgttattcagcaacatgcgcgtcgccattcgggcaccgctgagattatccaggcaaacgcaacgatgggcgtaccccggcacaacgcggttgattaacaccataccgggaatgttatccataaattgcgccagttcatcgtcactcaatgcttttgagtgaacaatcaacgcattacaacgctggcgaattaacacctcaatggcgtgacgctctttttccgcttcatgatagctattgccgattagcacgtatttctgatgctgctgagcgaccagatccaccgcttttaccagcgcgccgaaaaacgcatcagaaacgtccatcaccaccacgccaatggtgtcgctaacctgagttgccagcgcctgggcattggcgtttggccgataatccagctcactcacggctttcattactgcttcacgcgtgtcggcactgaccagcgtgctgttattgagcacccgggaaaccgttgccacagagacgccagcctgacgcgctacatcacgaatggtgatcatattcactacctgttatgagattgcagtaaatgactgcttgctggcggctattttgtcagcactgaatacaggacttcgtgaatcgagtcacagcaatggaaacggttacagccgttttgttaacgaatgtgatccagatcgttatcttgatgttttagatattgccggtccggcagcacgcaaagttaactgacgccagagccattccaccggcccctggcggaagtaacgcagccagataacagagaagaggatattcgccagccataccggaataacaaacgccagcagctccaggcggtcaaaatgcataaacaaaccgaggtggtaaaaaagcgtggtacaaatcagcgtttgcaatagatagttggtcagcgccatccgtccgacgcaggcgatcgcaagcaccagcttaaagcggctcaattgcggccagaagccataaaacagcgacgcatagccaatcgcctgaaacggcgcactcagttcccgcggcatttgaagtaagaaggcacaccagcgatacgcccagtccagctgccattgcagggcgatggcaggaaggttaatggtcaccccaatcgccaccagcacaaaaccagtacgacgatagtgacgtaagctgaactgccctttcagccagccgctgcgcatcagcgccgcaccaatgagcatcatccctgccagttgccagccatactgtgcgcccagtgccagtaaactgttgccaacaccatcggcacgattactgatcgcttcaacgccgccgtgaagcttccagtatttttcatacaaaatagccgatgcatccggcgtccaggcgcggctggtctggctgtcggaaatcagccccaataacagcaaaacgccaagccccaccagataaagcatgacgcctgtattaaacaggctttttaccgatggcgcatcgcgcaccagccgccagcagattaagcccaccagcccgtaagccagcaaaatatcgccgtcccagaacaataaaccgtgaataaagcccaacaagactaacagcgttaaccgcgactggatccagcgtctgccacggggcagcaacatttgcaggcccgcaccaaacagtagcgcaaaaagcgtgaggaatttcacctggccgatgagatcaagaaatgcccaagtccatgcatcccgcggcgtaatagcaccgtaccaggcgggattgagataagccgcctttggtagcccaaaggcgctgatgtttaatagcaggatccccagaatggcgacgccgcgaacaaaatcgagcgtgacgttgcgctccatggttcctgccttttaatcagttgtgatgacgcacagcgcgcagaaactcgtggcgcgtattctgactggatttgaacaatccaccaagagaggtcgttgtcgtggcactggttgcatcgcggatgccacgcgccttcacgcagtaatgcaccgcgtcgatcgagacagccacgttattggtgcccagcagcgtttgtagcgcaataagaatttgctgcgtcagacgttcctgcacctgcggacgctgggcaaagaactgcacaatgcggttaatttttgacagaccgatcaccgaatctttcgggatataggccaccgtcgctttgccatcgatggtaacaaaatggtgttcacaggtgctggtcagagtgatatcgcgcacggtgaccatttcatcgaccttcattttgttttcaatgagggtgattttcgggaaattggcgtaatccagaccggagaaaatttcatcgacatacattttagcgatgcgatgcggcgtttccatcaaactgtcatcagccaggtcgagattcagcagctgcatgatttcggtcatatgaccagcaataaggcttttgcgcgtttcgttatccatttcatgcacgggcgggcgcagcggtgtttccagtcctcgcgcaactaacgcttcatgaaccagggccgcttctttactgagtgatggcatttatgatttctcctgcaggtgtgacgcctccgccctgcgtgggggcaaagttattaagctgatttacagcctgattattgtgcgtgaggcggcgcacataatccagtattcacagcgataattattgtaattgccgctgcctttcatcagcagatgttaaaacatcgttatgcaaatacggaagtgaaagttactcacagcacattgaataaacggtatgatgaagaaattgcaaacaacacaacaaggagccacgcatggaaatgctcgaagagcaccgctgttttgaaggctggcagcaacgctggcgacacgactccagtaccttaaactgcccgatgacgttcagtatctttctccctccacctcgtgatcacactccgccaccagtgctgtactggctttccggattaacctgcaatgacgagaacttcaccaccaaggcgggtgcccagcgggtagcggcggaactggggattgtactggtgatgccagacaccagcccgcgcggcgaaaaggttgccaacgacgatggctacgatttaggccagggcgcaggcttttatcttaatgccacgcaaccgccgtgggcgacgcattaccggatgtatgattatctgcgcgatgaattaccggcgctggttcagtcgcaatttaatgtcagcgaccgctgcgccattagcggtcactcaatgggtggtcacggtgcgctgattatggcgctgaaaaatccgggtaaatacaccagcgtttcggcctttgcgccaattgtgaatccgtgcagcgtcccgtggggaatcaaagcgtttagcagctatttaggtgaggacaaaaatgcatggctggaatgggacagttgcgcactgatgtatgccagtaacgcgcaggatgcgatcccgacgcttatcgatcagggcgataatgatcagtttcttgccgaccagttgcaacctgcggtactggcagaagccgcgcgccagaaagcgtggccgatgacgctgcgtattcagccgggatatgatcacagttactacttcatcgcctcttttatagaggatcacctgcgcttccatgcgcagtatttactgaagtgaaagtccgcccggttcgccgggcatcttctcatcagaagcgataatccactgccataaagtaacgacgtccgtcttcgttatagctgtagtcgtcacgactgagatccttgtcgccaaggttcagcacgcctgcgcgcagtttgacgtctttagtcacctgccaggccgcgccggtattccagatggtataaccgcccggtgttttagccgtcgcgctgtcggcgcgtttctgcccggtatagtgcccagaaacatagaatgaccagtcttccagcgccagcggtttccagtccagcgtaccgttagcagtatggaacggcagatcggatagcggtttgttttcgccgttgctgacatcacgaccatcgttgtaggtgtagttgatcgacagtttccattcatcgttgaacggaattttcagttcggtttccacgccctgaatacgagctttgttaacgttgtagtagctaaataccggtatgcgccgtccgttagcgcccgtctcaaaaccaacaaagttttggtagcccggtgcagcgttgacgtcagacgtacggctgatgctgatacgatctttcacatcgttacggaaaacggtaacgctggattcaaccccttccagccagccttcttcacccatgtagtaaagccccagctcccaactttcgctggtttctggtttcagatccgggctacccacaatcttacatgcgccacggcaggaattgctcgtccagtcagggctaagttgcaacagagaaggtgctttaaatgccgtcgcccagccccctttcaccgttacggtgtcggtggcgttataaaccaggtaggcacgcggactccagtgttcaccgtaggtttcgtgatcgtccatacgcacgccggtcgtcagcgccagcggctcgaagatccgccattcatcttccacaaacagcgcgtactggctggcagacgttttggagctggttcccccggtcaggttcaccgcatcgctaagtttgtcgtgacgccattcaccgccaaccgtgagaaactgattaatcgccgtcagcggcaacgtgtatttgccgtcgaccgtattgctttcggaagttatcgggctgctgttgccagggtttttgttctcgactttctcaccgtagtatttcagttcgctggtgccgtaatcccaacgcccattatggctgacggagtagttctggcgttccaggcggtttttgtccagcgagtcggaatcacgatcctgacggtcgaaaccgtatccggcagtaaaatcgtgattttgattcggtgtccaggcaaattcgacattgccgtcgcggctggagaatccttcaatacgcggcgtttctccggtatcggtggtcgttgagttttgcgggtcatccttttcacgttttgccaggctgccgtaagctttcattcccagcacaccatcaattaatggtccactggtaaagaactgaccgttataggtgtcaccgcgatcgcgatgttcctgaatggtggtatcgacggtaacggtacccgaccatttctgaccgatttttttggtgatgatattcactacaccgccgagcgcatcggaaccgtacagcgacgacatcgggccacggaccacttcaatacgttcgatggaatcgaccgggatccagttcagatcgaaatcattgtggcggaagacggcattgcgggagttcacgcgtttaccgtcgacgagaatcagggtatagctgctgtccagaccacgaatactaacgcccttacggttatccccttcgttcgtcagttgtacgccaggcacttctttgaggacatccttcagattctgtaccggttttcgctgcaggtcttcctgggtaatgacgctgatactggcaggtgcatctttaagattttgttccacggaagatgcagtgacaaccatcgtttcgccatcatcatcgaccgctaacacaggccatgcacaagaaatagcggacaaacacagcccgacccgtacgaaagggttcaacctaaacattccatatctccatgaggtaactacgaaaataaaatgggttatcgctcacatcttcttcacgtccccttgcgtacggcagcatcgcggtggacttattttttatgcaggtgatcatcccagaaagccggaacagcctctgatttgtcagccttttttgattgcggcgtaacgataatgcaaacgataacaattatcaatccaaatgttaaattttatatccgcatgatttgtcagggaaatggaattgaaaaagccctctcggttgagagggcttagcaaggaagggaggaaacttatttcttatcgttctgcgggaacttcatttcgctgtagcgtacgaagtgagttcctttaatcagcttgtagccgaaccaaataatcaggaacagcgggataccaatatacgttgccgctacgccgccccagtcaatagtatctttcaggaacgcttcgtagttctggcccaaagtgataatcagacacagaatgaatgcgaagatcggccccagtgggaagaaacctgaacggtacggcagatcgttaatgtcgtgtccctgcaatacgtaaccgcgacggaagcgatagtggctaatggcaatccccagccaggcgataaaacccgtcatcccggaggtgttcagcagccacaggtataccgtctggttgccaaacatggaggtcaggaagcacagaccggcaatcaccgtcgtcgcatacagcgcattacgcggcacgccaccacgcgacagtttagcgaaaatgcgcggcgctttaccgtcacacgccagggtgtacagcatacgagtagacgcatacataccggagttacccgctgacagcaccgccgtcagaataactgcgttcatcaccgccgccgcagagagcagacccgcgtgctggaacaccagggtgaacggactaacgctgatgtctttaacatcgttacgcagcaggctcggatcggtgtacggaataatcaggctgataatcaggatcgcgaacacatagaacaacaggattcgccagaacacctgacgtaccgcgcgtggaatgtttttcgccggatcttcggactcgcctgcagcaataccgatcagctcggttccctggaaagagaagccgacaatcatagctacgccgatcatcgccgcaaaaccaccagcaaacggcgcttcgccgattgtccagttgctccagcccgcaggctgcgcgcctttgaagataccgataatcatcagcacgccaacgatgataaagacaataactgtcgtgactttgatcagtgagaaccagtattccgcttcaccaaagccacgaactgagatgtagttcagcaggaagataacgccgaggaacaacgcactccagatccagcccggtgtatccgggaaccaccagctcatgaccagctgagctgcaaccaggtcaacggcgatagtcaccgcccagttgtaccagtagttccagcccagcgcgaagccaaagccttcttcaacatagttctgaccgtaagtggcaaacgaaccggaaaccggcatatatgcagccagttcaccgagactggtcatcaggaagtaaaccatcaggccaatcagcatatacgagagcaatgccccgcccggacctgcctgagaaatcgttgcgccagaggcaacaaaaagacctgtaccgatggaaccgccaatggcaatcatcgtcaggtgacgcgcctttaattcacggcgtaagcccggcgcttctgtggttttagtttcggaaaccatacaaaaatgctatccatcttaaaaatgaggcgcgattgtagcagacgattggcaatccttccggcagaaatacacggttataagacaccttcatgatcgcccagggattataagtaaagcagccaatctcttttctggcgaatgcatgctgaaggcgctgcgtcacgaaatcgacacagcaccagcatgttcttgtacagcaacttaacgcggcacatttgcgggatcgcaatagtccagaaagcgccgtagcgcgttggaaaggtgtttttgccgatgatgtatacgccacaacgtacgcatcaggcgcggcagagggaccgcaacttcacttaatgtgcctgcctgcaattgatcttcaatcacacgtcgcgacaggcaactaattcccaacccatgacgcaccgcatgtttgattgcctcggagttacctaattccatcgccatctcaaacttcggtaaatgtgacagcaacagataatcgacaatctcccgcgtgccggaaccgcgttcacgcaggatccacggcgcagcggccagctgttctaaggtgaccggaccacgggccaacggcgaagtcggcgcggcgaaaaccaccagctcgtcttccagccacggttcagaaatgatttcagtgctgtggcacggtccttcaataaagccaatatcaacgcggaaatccagcaccgcttgcatcacgtcctggctattcccaacgctaagttcaatcggcaactgcggataatcatggcgataacgggcgataactgcaggcagaatgtagttaccgatggtactactggcatagatacgaatcgcgccgttgtcttcgcgaaacagttgttcgatttcaaccgcctgttcaagcaatgccaacgcacgcggatagagcagccgcccgtgttcattaacaaccagtcttttccccacgcgatcaaacagttgcacgccaagctgcccttccaggtcggtcaaggctgcgctcactgctgattgcgacaacgccagcatcaccgacgcctgggtggttgatccacttttcaatacttctgcaaaaacttccaactgccggagggtgatgtgcatagtcgcttaccacttataaagattaattataaatatataatcaattttatttttaaaccagttagtcgtaaccttatgcccggttaaaggagagggttatgacgaatatcaccttacagaaacaacatcgtacactgtggcattttattccggggttagccctgagtgcagttatcaccggggtcgccctgtggggtggttccattcccgcggttgcgggtgccgggtttagtgccctcaccctcgcaatcttgttggggatggttttaggcaacaccatctatccgcacatctggaaaagctgtgacggtggtgtgctgtttgccaagcaatatttattacgtctgggtatcattctttatggcttccgtctgacgttctcgcaaattgccgatgtcggtatcagtgggatcatcattgacgtgttgacgctgtccagtaccttcctgctggcttgcttcctggggcagaaagtgtttggtctggataagcacaccagctggttgatcggtgccggtagcagtatctgtggtgctgccgcggtactggcgactgagccggtagtgaaagcggaagccagtaaagtaaccgtggctgttgcaaccgttgttatcttcgggaccgtcgcgattttcctctacccggcgatatatccgctgatgtctcaatggtttagtccggaaactttcggtatctacattggttctactgtgcacgaagtggcgcaggtggtggcggcaggtcatgccatcagcccggatgcggaaaacgcagcagttatttccaaaatgctgcgcgtgatgatgctggctccgttcctcatcctgctggcggcgcgtgttaaacagctgtctggggcgaacagcggcgagaaaagcaaaatcactattccgtggtttgccatcttgttcatcgtagttgccatctttaactcgttccacctgttaccgcagagcgtggtgaacatgctggtaacgctggataccttcctgctggcaatggcgatggcggcgctgggtctgaccactcacgtcagcgcgctgaaaaaagctggggcgaaacctctgctgatggcactggtactgtttgcctggctgattgttggtggtggtgcgattaactatgtgattcaaagcgtcatcgcataaaccactacatcttgctcctgttaacccgctatcattaccgttttcctccagcgggtttaacaggagtcctcgcatgaaatacattggagcgcacgttagtgctgctggcggtctggcaaatgccgcaattcgcgccgccgaaatcgacgcaaccgcgtttgccttgttcaccaaaaaccaacgtcagtggcgtgccgcaccgctcacgacgcaaaccatcgatgaattcaaagccgcctgtgaaaaatatcactacacatcggcgcaaattcttccccacgacagttatctgattaacctcggacatccggtcactgaagctctggaaaaatcgcgcgatgcctttatagatgaaatgcagcgttgcgaacagctggggctttctttgctcaacttccaccctggcagccatctgatgcagatttcagaagaggattgccttgcgcgtattgccgaatccatcaacattgcgctggataaaactcaaggtgtgacagcggtgatagaaaacaccgccggtcagggcagtaacttagggtttaaattcgaacatctcgcggcgattatcgacggcgtggaagataaatcccgcgtcggcgtctgcattgatacctgccatgctttcgctgccgggtatgatttgcgtactccagccgaatgcgagaaaacattcgcggattttgcccgtactgtcggctttaagtatctgcgcgggatgcaccttaacgatgcgaaaagcacctttggcagccgcgttgaccgccatcatagcctcggtgaaggcaatatcggtcatgatgcgttccgctggatcatgcaggacgaccgtttcgacggcattccgctgatcctcgaaaccatcaacccggatatctgggcagaagagatcgcctggctgaaagcgcaacaaactgaaaaagcggtagcctgaagatgaataaccgggaaaaggagatccttgcaattttacggcgtaacccgctgattcagcagaacgaaattgcggacatgctgcaaatcagccgttcgcgcgttgcggcgcatattatggatttaatgcgcaaaggccggattaaaggcaaaggttacattctcaccgagcaggaatactgcgtagtggtggggacaatcaatatggatattcgcgggatggcggatatccgttacccgcaatcggcttctcatcccggtacaattcattgctcagcgggcggcgtgggacgcaacatcgcccacaatctggcgctgttaggccgtgacgtccatttgctttcagtgattggcgatgacttttatggcgaaatgctcctggaagaaacgcgccgtgccggcgtgaatgtctccggctgcgttcgtttgcatggtcaaagcacatcgacgtatctggcaattgccaatcgagacgatcaaaccgtgctggcgattaacgatacccatctgctggaacagttgacaccgcaactactgaacgggtcgcgcgatttacttcgtcatgcgggcgtggtactggctgattgcaacctgacagccgaggcgctggaatgggtctttaccctcgctgatgaaatcccggtgtttgtcgataccgtttcagaattcaaagcgggcaaaatcaaacactggctggcgcatattcacaccctgaaacccactttaccggagctggaaattttatggggacaggcgatcaccagcgatgctgaccgtaataccgcagtgaatgcattgcatcagcaaggtgttcagcaactgtttgtttatttgcccgatgagtcagtttattgcagcgaaaaggatggagaacaatttttgctgaccgcgccagcgcatacgacagtagacagttttggtgctgacgatggttttatggcgggcctggtatatagctttcttgaaggatacagtttccgcgacagcgcccgttttgcggtagcctgcgcggcaatttcgcgcgccagcggcagcttaaacaaccctaccctgtctgccgataacgcgctttcattagtgccaatggtgtaacaatgttgccggatgcgacgcttaacgcgtcttatccggcctacaaatcaggcaatttcagcaagtaaatgtaggcctgataagcttgcgcatcaggcaatgacactcaagctaaaccaataaagaacccggcaatggtcgcactcatcaagttggaaagcgtcgccgccgccagcgcccgtaaaccaagctgggcgatttccggcgcacggtgtggcgcaaccgcagaaaacgcccccaccaccaccccgatagaaccaaagttagcgaaaccgcacaacgcgaaggaaataatcgccacagttttagcatcgagagtgccagccgtttgcagatagggtgagaaattgagataagcgacaaattcatttattgccagtttctgtccaatcaaactcccggcaagattcgcatcactccagtccacacccatcacccacgccagtggagccagcaggtaacctaaaatggactccagcgaggcatgttcaaaaccaaaccagccaccaacgccgccgataataccgttaatcaacgcaattattgcaacaaatgccatcaccactgttgccacacctgcggcgattttcagcccggtcattgcccctgtcgcagcggcttcaataatgctttttggcggtgtttcggtgaaagagaggttattaaaggaaacctgcgaagattccgttgccgggcttaacaggcgggcaaacaagatcccgccagggatcgccattaatgatgccgccagcagatattccacaggcacgcccagtgcggcgtaaccaatcattgtcgaaccagcaatcgaggccatgccactacaaatcgctgtaaataattcattgcgattcagacgatcgataaagggtttgacgattgccggaatttcgttttgcccgaggaaaatggtggtgaccgcgacgaatgactcgatcttgctgatatttaatgctttctggaagataccgccgagaattcgaattaaaatccccatcacaccgatgtagtagagaatactcaccagcgcggtgacgaagataattgccggtaacaccctgaaaccaaagataaatcctgcaccatcaaataaggtatccattttcggtccgaccagagaaccgaagataaatgcgctacccgcgtcgctgtacgccatcactttatgcacgccaaaagcgactttttcagcgacccaacgccctggcggtaaccaaagcataatgccgccaatcacgacctgtaacactaacgccgcgccaacggtacgcaggctgatcttcttcttgtttactgacagtaaaaacgcaatcgtcagcaataccaccattcccagaacacttctcatgacatccatagtgattatctcttcatgtcatattgggcgacggctttctgcccatcagaaatagccaggcctgcatcttgcgataccggcccggcttgttatcaacacttaatgggttttgatgtagccgcgcacgcactcttcgactaatccccagaaccagtctgtatcaatagtgatgccgactttggtattggcgggcttgccaagaacgcccagctcgtcgcagacggtacgcccatagcaagggccactgttgacgtccacttcgacgtacatctcctgggttttaatgccatcagggttaatcagataaccgatgcaggtggcgtcgtgcaccgggccgccagcaaggccgtagttttcgaactgcgttttgagagtgaagttcatgatgtcgctgaacagctctccggcggggccgcctgccctttccatccgagcaatcacgtccggggtgcaaacggtctggttggtgagatcgaggcccatcatcactaatggaacgccggaggtgaacactacgcgtgcggcttccgggtcggcaaagatgttgaactcggcagatggcgtgaagttgcctgtaccgtaagcgccgcccattagcacaatttcacggattttgggcaggatcgcgggttgcatacgcattgccaccgcgatatttgaaagcggaccaaccggcaccagagtgatatcgccatcgcttgccatcagggtatcaatgatatatttcaccgcatgagtgctttctgcctggcgggtcagcggctcgaataccgggccatccagtccggtttcaccgtgaatattatcggcaacgatttgttgacgcataatgggctgcggcatccccgcataaaccggaacattaatctccagtttctggcaaacattcaggccattaattaatgttttatcaagcgtctgattacccgctacaatagtgatgcctaataaatctattgccggatgtttcgccgccatcattatagcaatagcatcatcatgacccggatcacaatccagaataatttttctcttttccattgtttatttcctctgtttccagttgcgttattttttctacagcaaagaaaattcgaccgggccgatgattgaatcttaacaacagcgtacgtatgctaaatatgagaaatctcatagcggataaacatcgtgaaagaaatccacaataatgatcttaagcagcaattgatgagtgaatccgcgtttaaggattgctttttaacggatgtttcagccgatacgcggctgtttcattttttagcgcgtgactacattgtgcaggaagggcaacagccgtcctggctgttttacctgacgcgaggccgcgccaggctttacgccacgctagctaatggtcgcgtgtcgctgatcgatttctttgccgccccctgttttattggcgagattgagttaatcgataaagaccatgaaccgcgtgcggtgcaggctattgaagagtgttggtgccttgcgctccctatgaaacattaccgtccgctgttattaaacgacacgctatttttacgaaaactctgcgtcaccttaagtcataaaaattatcgtaatattgtttctttaactcagaatcaatcatttccgttagtgaatcgcctggcagcatttatattactctcgcaggaaggtgatctttatcacgaaaagcatacgcaagcggcagagtatttaggcgtttcttatcgacatcttttatatgttctcgcgcagttcattcacgacggtttattaattaaaagcaagaaagggtatctcattaaaaacagaaagcagttgtcaggactggcgctggagatggacccggagaataaattctccgggatgatgcagtaaaaattattttcaatagcgcgattgccggatgcaacgcttaatacgttttatccggtctacaaatcgagcattacgccagaccaataaagaacccggcaatagtcgcactcatcaggttggaaagcgttgctgctgccagcgcccgtaaaccaagctgggcgatttccggcgcgcgttttggcgaaatagccgaaaatgcgccaacgacaacaccgatagaaccaaagttagcaaaaccacaaagcgcaaaggagataatcgcaatggttttcacttccagcgtgccgcccgtttgcaggtatggggagaaactcaggtaagcgacgaattcgttaatcgccagtttctgcccaatcaggctacccgcaagattggcatcactccagtccacacccatgatccacgccagcggtgccagcacatagccaaaaatactttccagagaggcattggcgaaaccaaaccagccgccaattccgccgataatgccgttgatcagcgcaataattgcgacaaacgccattaccaccgtcgccacaccagcggcgatttttagcccggtcatcgcaccgctcgccgccgcttcgataaagctttttggcggcgtttcgctgaacgacagattttcaaatgtgacctgcgaaggctcggttgccgggctaagaatacgtgcaaacaaaatcccgccagggatcgccatcagcgatgccgctaacaggtagtcaattggtacgcccattccggcataaccaatcatcatcgaaccagcaatggacgccatcccgctacaaattgcggtaaacaactcgttgcgattcatgcgatcgataaacggtttaacgatcgccgggatctcattttgcccgaggaaaatagtagtaaccgcaacaaaagattcgattttgctgatgttgagggctttctggaaaatgctgccaaggatgcgaatcagcagccccatcacgccaatgtagtacagcagactgatgagcgcagtaacgaaaataatcgccggaagtacgcgaaaggcgaagataaaacccgcaccgtcaaacaggacatccattttcggcccaaccagcgaaccaaaaatgaaggcgctaccggcatcactgtaagacatcactttatgaacgcctaatgccgcctgttctactgcccattttcccggtgggaagtagagcatgatgccaccaatagcgatttgcagcagcagtgcggctccaaccgtgcgcaaactgatgctctttttattcactgacaacagaaatgctattgccagtaacaccaccatccccacaacacttctcattatatccataatgattttcccttcatgccggtaaacccggcgtcagcgccaggttttggtatgcttgatgagtacgggcgacggctttctgcccgtcagaaattaacccgcgagacgctgatattctttggcaatttcgctcgccagaatggcgttgttgaacaccagctggatgttggatttcaggctgtcaccgccggtcagttcagcaacgcgcgccagcaggaatggcgtactttctttaccaatgactccctgagcttcagcttcagctaccgcctgatcgatcgccgcattgatagtgtgttccggcatagcaaactgttccgggatcgggttcgctaccacgaggccaccgttcagaccgctttgccatttcaccaccattgcacgggcaatttcgctggcgctgtcgagacgaatgctgacgtcaaacgggctggtgcggcagaaaaacgcaggcagcgctttagtctgatagccaattaacggcacaccgaaggtttctaaatactcagtggttaatcctaaatcgagaatagatttcgccccggcacaaacaacggtgacattagtatttgccagttcttgcaaatcggcagaaatatcgaaggtatgttccgccccgcgatgcacaccaccaattcccccggtggcaaatactttaattccggcaagcgccgcaataatcatcgttgaagccacagtggttgcgccattttttccggcggcaacaacaaaaggtaaatcgcgacgactaactttggtcacgttatgcccttcacgacccagtaattcaatttcttctttgcttaaccccactttcatcacgccgccaataatggcgatcgtggcaggtacagcgccctgtttacgaatagtttcttcaacttcaattgcggtctgggcattttgtgggaacggcatcccgtgagaaataatggtcgattccagcgccacaaccggttttttgttttttaaagcgtcctgcacttccggggaaatttgtaataattcaggggaaatttttaattcagacattctgcgttctccactaacgatataacgttggcaatcgataaatcggggttattggtgtattcacaggagagcgccattgacgaacatccctgtgcgaaacgaacagattcggcaaacggcattccgtctacccaacacgaagcaagtcccgccatcatggcatcgcccgctccggtaacattaataacattggttttgatcggcgcagaccagccactttcaccgctgatatcgctgtaataaacgccgtcgccgcccatgctcaataccagtcggttcaggccatgttgatggaaccaggcagcaacttttgccacatcttcacgccctgacagcgcaatcccactcagggtttccgcttcaaggcggtttggcttgagagtgtggatctgatttagacggtcgcgcactttgacacatttccatgccgaaaccggatcgacaaatacgggtacgttggcggcattatccagaatccatgccagtgcctcttcactgatattacagtccgcgacaatgacctttgccctctgaataaattcaccgtgctgtgcgagatattcagctgtaatagcgttgctaatattcatgtcatttatagcaaccagcatttcaccggtattatcgagtaatgataaataactcgacgtattttctcccggcacaatcaggcatttatcgacataaacgccagattgattggtttgcgttagcagcgattgaccataaaaatcactgcctacggcgctcagtagccaggctttgttacccagcaacgccaggttttgtgcaatattgcgccctactccaccaggcgtaaattttattttacctggatttgaatccgcataatttaatgattcatgtgaatatccggcgacatcaatattcgccgaacctataattacgacataatccttttcgcgcatagcacgtcctctggtaaaaaattaccaaccctgtcaatccacaagaatatagatactgcaaagacggtttaaacatgtgttcatatttaaacatgtgctcatagtatgcatgttttacgtaaagtaaattaccgccagagaggcaaaatgggcagatttgagcaggctcacaaaatgcgattaaatgcctgaattacaaaagcgaggaatttgtgacgggatgcacagaacagaacaataaaaaagggcagaaaataatctgcccttgaggaaataacctgagtgtttgatgaacgtttgaagtttctactgaaagataaaaccatttaaattcataaaattacattcacaaaccggtcattctctttgcgctcatcaaatgttacaggacaggaaatttctgccctgtaacacaccttttattacgctgctttcgctactgcgtccacttccggacgtttcaggaaggcataggccaaacccgccaccagcgtaccggcaataattgctaccaggtaacccaataccggcgtaatagcgccagggatcagcagaacaaacagaccaccgtgcggtgccatcagtttcgcaccaatcgccattgagattgcgccagtcagcgccccacccacgatacagcacggcagcacacgcatcggatcacgagcagcaaacggaattgcaccttccgaaatgaagcacagtcccaataccagagcggctttgccaccttcctgctgcgctttgtcgaatttgcgacgcgccaccattgttgccagacccattgccagcggtggcaccatacctgccgccataatcgccgccatcgggccataggtttgagtactcagcagacccacaccgaatgcgtacgctgctttgtttaccggaccgcccatgtcagtacacatcatgccaccgaggatcgcccccagcagaaccgcattcgcagtccccatggtctgcagccagtgagtcagcccttcgagaatgccagcaactggtttaccgatcaggtagatcatcgccagaccgaccaccagactggaaattagcggaatgatcaggatcggtttcagcgcctccatactctgtggcagtttcaattgcgtactgattaacttcgcaatgtaaccagccaggaagcccgcaataataccaccaatgaagccagaaccggtgctgaccgccagcataccgccaatcagacccggagtgaggcccggacgatcggcaatggaaaaggcaatataacctgccagtaccggcaccatcagcgcaaaggctgaaccaccaccaatctgcatcagcgccgcagccaacgtacccggctctttaaacgcttcgataccaaaagcaaaagaaagcgcgatacacagaccacctgcaacgaccatcggcagcatgtaagaaacgcccgtcagcaagtgacggtatgcgcctgcactctctttcttactttcagtggtcgccgtttgagctttgcccgccggttcatacggcgttgcttcagcaaccgctttatccagttcctgcgcggttttcttcagcgccagaccggtagaggtacgatacatcggtttaccagcaaatttcgccagatccacttcgatatctgccgccacaatcaccagatccgctgctgcgacttcttcgggagtgattgcattacccgcgccaacagaaccacgggtttcaactttcacccaccagccacgttttttcgcttcggtttcaatggcttcagccgccataaaggtgtgtgctacgccagtcgggcaagcagtcaccgcaactacgcgtttcggaccgctggcggcaactggtgctgtcgcagcgaccggcgcagtgtaaggtttcgcatggcctttggcttcactcaggaacagctcagggtgcgcaactgcccgggaaatatcgcccagccagacatttttaccgttcagcgcgctgtcgttcgggatggaatcaccgagaacaatcgccatttcagcgtcgttcggattgtcgatgatttccagttttgcttttcgcgccgccgcgcccagcagggtcttcgccatataggcgcgtgcctgaccgagattagcgtcaataatcagcagcgttttcattatgcctctcctgctgtcagttaaaaggttgtaagtcgacgcgcgccatcattgcggccaactgcggacgatcggtaatacccacattgctttgacttaccgccagggctgcaacagctgtcgccagacgcagtgtgtgttcactggattcacgcatcagcaagccataaatcaggccaccaaccatagaatcccctgcgccaacggtgcttacgacatcgactgacggtggtttggcgatccattcgccggaggcattaacccaaagcgcgccttcggcacccagtgaaataacaacatgcgcgatgccttgttcacgtagcgcatgtgcagcttcaatcacatctttcatttcaggcagtttacggcctgcccagatttccagctcgcggcggttaggtttcaccagccacggtgccgctttcaaacctgctactaacgcttcacggctactatcaaagataatgcaaggacactgactacgcaggcgagtcatccagtcggtgaacgcttccgggctgacgcctgacggtaagcttccgctgacacagaccatatcgaactgaccgagccagctcagagaatcagtcacaaagcgttcccagtcggcgggggtgacttcaaaacccgagaagttgaagtcggtcacttcgccgtctttttccgtcagcttaacgttaattcgggtgcgcccctgtacaacctggaaacggttggcaatgcccagctcgctgaacagttgctgaaaaccatcctgattgtctttacccaggaagccgccaacggtgacatcaattcccaggtcttttaatactttggccacgttgatgcctttacccgccgcatgcagaccggtggttttcaccaggttcacttcgccgcgttcaatttccgggcagaaaccaacaaggtcataagccggattaagggtgatagtagcaacacgtctgctcattatgcgccctccccaagaccagcagcgatagcgtcgccgattgctttcagcgcctgttcagcatctgcaccctgggcggtaaagcgtaggcgatgacctttcttaacgccaagtgccacaactttcatcagactacgtccgtttgccggtttgccggtaccatcaaggtttgtcacggtaatatcactgttaaattgtttaatggtattgaccagcatggtacctggacgagcatgcaggccgtgttcattgcgcaccacaaactccgcgcttaacacgtcgtcggtcggcgcatcatcgctggtcagcagcgccagcaacgttgccgcatccgctttcagcaagcggtcagctttattgtcgagcaataaatcagcgagacgcttaagaaccgcgatgggctgatcgtcattcatcgccacactcaccagcatggctgccgtttcgccgtccacatcaaaagcatttgccgcacggcttaccgcaatcgcgctacgcagattgccttcggcgctatcgctcagccagataccctgtccgagattcagcggttgttcattgatggctttggtgacgaaagtggcgtcaactgcccccgcctctttcagacgcgcagcgttcagcgcctgaagagtcagcagatcgctggcgacgatatccagtgtcagcatttcgttgtcgagcttcagctgctcactctgcttttcgcccatcagtaatgcgcgaagttcttctgctgttgttgctgacttcagttgttcagcaacggaatcatcgctcagtacgtgggtcagctggcgtagcaggcccagatgttcatccgagctggcagcaataccgattgccacgtacgctacctgaccgtcaccccaggtgacgccttccgggaactgaaatacctgaacgccggttttcagcacctgatcgcgggtgtcggtagtgccgtgtggaatagcaataccattgccgaggaacgttgaggtttgctgttcgcgcgccagcatgccattgacgtagccttctgctacattaccggcctgcaccagcgccgcagcgacctggcgaatcgcctcttctttgtctccggccttttcgcccggatggatgtcctgtacggataactggaacatagttctcctctcttgctgaattgaaacgattcagcctctatgagaaaaaaagcgccaacctggcttagggttaaagacaagatcgcgctgaaacgtttcaagaaagcataatacttctgtttcagcacgcaaggaaagccgtaaagttatgagcaaaagtttgatgtgctgcacaattttttgccatttttcctaattgctgatgggaaaatccgttatcagcaatttcatttcagcagcgtcagcagccaatcagcaacagtgaaatggcattttgactattcgtggcgcttttgatttcgctgtctgtttattttctgacaagcagcgtaaactccgcgtcttcctcttccagtgatcgaccagcatgcataactcccccgcagtctccagcgcgaaatcgtttgacctgacctcgacggcgtttttaatcgttgcctttctcaccggtattgcgggcgctctgcaaaccccgacactcagtatttttcttaccgatgaagtacatgcccgtccggcgatggtgggattcttctttaccggcagcgctgtcattgggattctggtaagtcagtttctcgccgggcgctctgataagcgcggcgatcgcaaatcgctgattgtcttttgctgcctgttaggcgtgctggcctgcaccctttttgcctggaatcgcaactactttgttttgctattcgttggcgtctttcttagcagctttggctcgaccgctaacccgcaaatgtttgcccttgcccgtgaacatgccgacaaaaccggacgtgaggcggtgatgttcagctcttttttacgcgctcaggtttcactggcatgggtcattggcccaccgctggcttatgccttagcgatgggtttcagctttacggtaatgtatctgagcgcagcggtagcgtttattgtttgcggtgtgatggtgtggctgtttttaccgtcgatgcgaaaagagcttccgctggcgaccggcacgatcgaagcgccgcgccgtaaccgtcgcgatacgctgctgctgtttgtcatttgtacattgatgtggggctcgaacagcctgtacatcatcaacatgccgctatttattatcaacgaactgcatcttcccgagaaactggccggtgtgatgatggggaccgccgccgggctggaaatcccgacgatgttgattgccggatatttcgccaaacgtctgggtaagcgtttcttaatgcgcgttgctgccgtgggtggcgtctgtttttacgcaggaatgctgatggcgcattcacctgtcattctgttgggcttgcagctgctaaatgctatttttattggcattctgggcggcatcgggatgctctattttcaggatctgatgcccggtcaggcgggttcagccaccacgctctataccaacacttcgcgcgtgggctggatcatcgcaggatcagtggcgggcatcgtcgccgagatctggaattatcacgctgtgttctggtttgcgatggtgatgattatcgccactctgttttgcttactgcggattaaagatgtttaaggcgcggtcagcatttccagatcgataagccaggtcatggcctgctgacgcgagttaccgcacatttcagcgctggcttgtaagcctgcacagactttcggtcgcagtggcgaggtgaaaattttacagcgttgctgttcatcaagctgaatgcagggcgtattggcgggcttgccatctggcataccgggaatagggctggaaattgaaggggcagtgcaacacgccccgcaacccggacggcattccatacgttgttctcttaaggttaaccaccggattgatgagcgcgcacagtaccaccttttttgcaccagcaaaagtgcgaataccacttgcccgaaaggcccgtcgcgagtactttgtcgcgatatttttgacattttcgactacaggaatttttcgatgccaagagcgaacgaaattaaaaaaggtatggtactgaattacaacggcaaactgctgctggttaaggatattgatattcagtcgcccactgcccgcggtgccgctacgctgtacaaaatgcgtttttctgatgtccgtaccgggctgaaagtagaagagcgtttcaaaggtgatgatatcgttgacaccgtgacgctgacccgccgttacgttgacttctcctatgtcgatggcaacgaatatgtctttatggataaagaagactataccccgtataccttcaccaaagatcagattgaagaagagttgctgtttatgccagagggcggcatgccggacatgcaggtgctgacctgggacggtcaactgctggcgcttgagctgccgcagaccgttgatctggaaatcgttgaaaccgcaccaggcatcaaaggggcatctgccagcgcccgtaacaaaccggcgacattgagcactggtctggtgattcaggtaccagaatacttaagcccgggcgaaaaaattcgtatccatatcgaagaacgccgttatatggggcgtgctgactaacttcagccgcatgcagaaaagggatagctcaggctgtcccttttttaatttattataccaatcttctattttgcgcttcctgaacaccttacgccctcaattttcactcgttgattgatcgccctcacacttcatcgcattaacaatccagaccaatttcaattgctgtcatataactttacactgtcgttgttaattaatcgttactaagacgtgactcctatgaatacaatcgcctccgttacgctcccgcatcatgtacacgctccacgctatgatcgccagcagttgcaatcacgtatcgttcattttggctttggagcctttcaccgcgctcatcaggcgttactgaccgatcgtgtgctgaatgcccagggcggcgactgggggatctgtgaaatcagcttgttcagcggtgatcaactgatgagccagctccgcgcacagaaccatttatataccgtgctggagaaaggtgcggacggcaatcaggtgataattgtcggtgccgttcacgaatgccttaatgcaaaactggattccttagcggcaattattgagaaattttgcgagccacaggtggcaattgtttccctgacgattaccgaaaaaggctattgtattgacccggccaccggtgcactcgacaccagtaatccgcggattattcacgatctacaaacccctgaagaacctcactccgcaccgggtattctcgtcgaagcactgaaacgccgccgtgagcgcggccttacaccgtttaccgtgctctcctgcgacaatattcccgacaatggtcatgtggtgaaaaacgcggtgctgggaatggcagaaaaacgttcgccagaactcgccgggtggataaaagagcacgtcagttttccgggaaccatggtcgaccgcattgttccggctgcaaccgacgaatcactggtggaaatcagccagcatctgggggtgaatgatccctgcgcgattagctgcgaaccgtttatccagtgggtggtggaagataacttcgtcgctgggcgtcctgcctgggaagtcgcaggtgtacaaatggtgaatgatgtcctgccatgggaagagatgaaactgcggatgcttaatggcagccactcttttctcgcttatctgggttacctctcaggattcgcccatatcagtgattgcatgcaggatcgcgcatttcgccatgccgccagaacattaatgctggatgagcaagcgccgacactgcaaattaaagatgtcgatttaacacaatatgcggataagttaattgcacgttttgctaatccggcgctgaaacataagacctggcaaatcgcgatggatggcagccagaaattaccgcaacgcatgctggcaggtattcgcatacatcaggggcgcgaaacggactggtcgttgctggcattaggcgttgcaggctggatgcgttacgtcagcggcgttgatgatgccggaaatgccattgatgttcgcgatccgcttagcgataaaattcgcgaacttgttgcgggcagcagcagtgaacaacgcgtaaccgccctgctttccctgcgtgaagttttcggtgatgatctgccagataacccgcattttgtgcaggccatcgaacaagcctggcaacaaatcgtacaattcggcgcacatcaggcgctattaaacaccctcaaaatttaacgatttctgcggttaaagcggatgaagctcaccttcgtccgctctccccttctcttttctgccttttttagccaggattaacgctcagttaacttaccagagtattgcggagccgttgtgaccaggaccaacctcatcaccggttttctcggcagcgggaaaaccacgtcgattcttcatctgttagcccataaagatcccaacgaaaaatgggcggtactggttaatgaatttggggaagtcggaattgatggtgctttgctcgccgatagcggcgcattgctgaaagagatccccggcggctgcatgtgctgcgttaatggtttacccatgcaggtagggttgaataccttactgcgtcagggaaaaccagaccgcttgttgatagagccgaccgggctgggccatccgaaacagatcctcgatctgttaaccgcaccagtctatgaaccgtggatagatctgcgcgccaccttgtgcattctcgatccgcgcttgctgctggacgaaaaaagcgccagcaatgaaaacttccgtgaccagctggctgccgcagacatcattgtcgccaataaatccgaccgtacgacgcccgaaagtgagcaagcgctacagcgttggtggcagcaaaatggtggcgatcgacaattaattcacagtgagcatgggaaagttgacggtcatcttctggatttgccgcgtcgcaatttagccgagttgcccgccagcgccgcgcattctcatcagcatgtcgtgaaaaaagggttagcagcgttaagcctgccagagcatcaacgctggcgtcgcagtctgaacagcgggcaaggatatcaggcctgcggctggatattcgacgctgatacggtattcgacaccattggcattctggaatgggcgcgacttgcaccggtggaacgcgtcaaaggcgtgctgcgtattcccgaagggctggtgcgaatcaaccgtcagggcgatgacctgcacattgaaacgcaaaacgttgcgccaccggacagccgtattgagctgatttccagcagcgaagctgactggaatgccttgcagagcgcgctgttgaagcttcgtttagcgactaccgcgtaaggttgcctgcgtttttcagtaagataattagagaaaatatgattaaaaatttgccgcaaatagtgttgttgaatattgtcggcctcgcgctgtttctttcctggtatatccccgttaatcatggattctggttgccgattgatgcggatattttttatttctttaatcagaaactggtcgaaagtaaggcctttttgtggctggttgcattgaccaacaatcgcgccttcgacggttgttcactgctggcgatgggtatgttgatgctgagtttctggctgaaagaaaacgcccctggcagacgacgtatcgtgattattggtctggtcatgctattaactgcagtggtattaaaccagctgggtcaggcattaattcctgtaaaacgggccagcccaacattgacttttaccgatattaaccgcgtcagcgaactgctctctgttcccacgaaagatgcctcacgagatagctttcccggcgatcacggcatgatgctgcttattttttcggcattcatgtggcgttatttcggcaaagttgcaggccttatcgcccttattatttttgtggtttttgcatttcccagagtaatgattggcgcacactggtttactgacatcattgtcggttcgatgaccgtgatattgatcggtttgccctgggtgttgctgacgccattaagtgatcgattaatcaccttttttgacaaatcactaccaggaaaaaacaaacatttccaaaacaaataactcacagtaattaacatcatcagggttatttttatagtgaggataatcctgatgatgcgcaccgtgctttcatctatcgaacgcaaaaatcattctctaagtaaatgaatggattgcatgcgtttcactcaattgtactttaattgaccaaccccgcttattaactttctgtatcactttttcttataaaaaatcatgtaaaaccgctcgccaagaccgcaccaatcgggtaatctcgaactcgttttgcctcggcggtagattatcctcacagcatataattttgtgcgttagtccacagatttggccttaaggaattgtttcaacatgcccaggtaattagtctcgtgtcgcttggcatttttttataacgatatttgtcgttaaggacttcaagggaaaacaaacaacatggtcaaatctcaaccgattttgagatatatcttgcgcgggattcccgcgattgcagtagcggttctgctttctgcatgtagtgcaaataacaccgcaaagaatatgcatcctgagacacgtgcagtgggtagtgaaacatcatcactgcaagcttctcaggatgaatttgaaaacctggttcgtaatgtcgacgtaaaatcgcgaattatggatcagtatgctgactggaaaggcgtacgttatcgtctgggcggcagcactaaaaaaggtatcgattgttctggtttcgtacagcgtacattccgtgagcaatttggcttagaacttccgcgttcgacttacgaacagcaggaaatgggtaaatctgtttcccgcagtaatttgcgtacgggtgatttagttctgttccgtgccggttcaacgggacgccatgtcggtatttatatcggcaacaatcagtttgtccatgcttccaccagcagtggtgttattatttccagcatgaatgaaccgtactggaagaagcgttacaacgaagcacgccgggttctcagccgcagctaataaaccgtttggatgcaatcccttggctatcctgacgagttaactgaaagcactgcttaggcagtgcttttttgttttcattcatcagagaaaatgatgtttccgcgtcttgatccaggctatagtccggtcattgttatcttttaaatgttgtcgtaatttcaggaaattaacggaatcatgttcatacgcgctcccaattttggacgtaagctcctgcttacctgcattgttgcaggcgtaatgattgcgatactggtgagttgccttcagtttttagtggcctggcataagcacgaagtcaaatacgacacactgattaccgacgtacaaaagtatctcgatacctattttgccgacctgaaatccactactgaccggctccagccgctgaccttagatacctgccagcaagctaaccccgaactgaccgcccgcgcagcgtttagcatgaatgtccgaacgtttgtgctggtgaaagataaaaaaacattctgttcatctgcgaccggtgagatggacattccactcaatgaattgattccggcgctcgacattaataaaaacgtcgatatggcgatcttacccggcacgccgatggtgccgaacaaacccgcaatcgtcatctggtatcgcaaccctttgctgaaaaatagcggcgtctttgccgctctgaatctcaacctgacgccttcactcttttatagttcacggcaggaagattacgatggcgtcgccctcattattggcaatactgcgctatctaccttttcttcacgtttgatgaacgttaacgaattaaccgacatgccagtccgtgaaactaaaattgcgggcattcctctgaccgttcggctttatgcagatgactggacatggaacgatgtgtggtacgcatttttactgggcggcatgagtggaactgtcgttggcctgctctgctattacctgatgagcgtacgtatgcgccccggcagagaaatcatgaccgccatcaagcgcgaacaattttacgtggcgtatcaaccggtggtggatacacaagctttgcgagtaacgggcctggaagtactgctacgctggcggcatcctgtcgcgggagaaattcccccggatgccttcattaactttgccgaatcgcaaaagatgattgtgccgctgactcagcacctgtttgagttaattgcccgcgatgccgcagaattagaaaaagtgctgccggtaggcgtcaaatttggtattaacattgcgccggaccatctgcacagcgaaagctttaaagcagatatccagaaactgctcacttccctgcccgcacaccatttccagattgtgctggaaattaccgagcgcgatatgttgaaagagcaagaagccacacaactcttcgcctggctgcactcggtcggcgtagaaattgctattgatgacttcggcaccgggcacagcgcgcttatctatcttgagcgttttacgctcgattatctgaaaattgaccgtggatttatcaacgccatcggtacggaaacgatcacttcccccgtacttgacgcggtgctgacgctggcgaaacgcctcaatatgctgacggttgctgaaggggtcgaaacgccggaacaggcgcgatggctaagcgaacgcggcgttaatttcatgcaaggctactggattagccgcccgttaccgctggacgattttgttcgctggctaaagaaaccgtatacgccgcagtggtaaggtgtgcttacgtcccttattattcatagtgaaagcatgccggattgcggctaatgatgagtaaaaggaaatccgttgcagatgattgtgcgcatactgctgctgtttatcgctctgttcacctttggtgtgcaggcgcaggctatcaaggaaagctatgcctttgccgtgctgggcgaaccccggtacgcgtttaatttcaaccattttgattatgtgaaccccgccgcgccaaaaggtgggcagataacgttgtcagccctcggcaccttcgataatttcaaccgctatgcactgcgcggcaacccgggcgcacgcaccgagcagctgtacgacacgctatttacgacttccgatgacgaaccaggcagttattacccgctgattgctgaaagcgcacgctatgctgacgattattcctgggtggaggtcgctattaatccgcgcgcccgttttcatgatggttcgcccattactgcccgcgatgtagagtttacttttcaaaaatttatgaccgaaggcgtgccgcaatttcgtctggtctacaaaggcaccaccgtcaaagccattgcaccgttaaccgtgcgcattgagttagctaaacccggcaaagaagatatgctgagtctgttttcgctgccggtatttccagaaaagtactggaaggatcacaaacttagcgacccgctcgccacgcctccgcttgccagtggtccgtaccgcgttacgtcctggaaaatggggcaaaatattgtctattcccgtgtgaaagattactgggcagcaaacttaccggtaaaccgtggacgctggaatttcgacaccattcgctacgattattacctcgatgataatgtcgcctttgaagcgtttaaagcaggtgcctttgatttgcgtatggaaaacgacgccaaaaactgggccacgcgttataccggtaaaaatttcgataaaaaatacatcatcaaagatgagcaaaagaacgaatcagcccaggatacgcgttggctggcgtttaatatccaacgtccggtattcagcgatcgccgggtccgggaagctatcactctcgcctttgactttgaatggatgaacaaggcgttgttttacaatgcctggagtcgcacgaacagttattttcagaataccgaatacgcggccagaaattaccccgacgccgcggagctggtgcttctggcaccaatgaaaaaagatctaccgtcagaagtcttcacacaaatctaccagccgccggtatccaaaggcgatggctacgatcgtgacaacctgttaaaagccgacaaacttctcaacgaagcgggctgggtgctgaagggtcagcaacgcgttaatgccacaacgggtcagccactcagctttgaattattgcttcccgcaagcagcaatagtcagtgggtattgccgttccagcacagcctgcaacggctgggtatcaacatggacattcgcaaggtggataactcgcaaatcactaaccgcatgcgcagtcgcgactatgacatgatgccgcgcgtatggcgggcgatgccgtggcccagttccgatttacagatttcctggtcatcggaatatatcaattccacttataatgcccccggcgtgcaaagcccggttatcgactcgctgatcaaccaaattattgccgcgcagggaaataaagaaaaattactgccgttggggcgagcactggatcgcgtattaacgtggaattattacatgctgccaatgtggtacatggcggaagaccgtctcgcctggtgggataaattctcccagccggccgtgcgccccatctatagcctcggtatcgatacctggtggtatgacgtcaataaagcggccaaactgccgtccgccagcaaacagggagagtagatgggcgcttacctgattcgccgtctgttgctggtgatcccaacattatgggcgattatcaccatcaactttttcatcgtgcaaattgcgcctggcggtccggtcgaccaggccatcgccgccattgagtttggtaatgccggagtattacccggcgcaggcggtgaaggtgttcgtgccagccatgcgcaaacgggtgtcggcaatatcagcgacagtaattaccgtggcggacgcggattagatccagaagtgatcgctgagatcactcatcgctacggttttgataagccgatccacgaacgttacttcaaaatgctctgggactacatccgctttgattttggcgatagcctgtttcgcagcgcctcggtgctgacgctgattaaagacagtctgccggtttccatcaccctcggattgtggagcacgctgattatctatctggtgtcgattccgttaggcattcgcaaagctgtttataatgggagccgctttgacgtctggagtagcgcatttatcatcatcggctacgccattccggcctttttgtttgccatcctgctgattgtcttcttcgcgggcggcagctatttcgacctgttccctctacgcggcctggtttccgctaactttgattcgctgccgtggtatcagaaaatcaccgattatctgtggcatatcacgctgccggtgctggcgacagtgattggtggctttgcggcgctgaccatgctgacaaaaaactcattccttgatgaagtgcgcaagcaatacgtggtgaccgcgcgtgcgaaaggggtaagtgaaaaaaatattctctggaaacatgtgttccgcaacgccatgctgctggtgattgccggttttccggcgacgtttatcagcatgttttttaccggctcgctgctgattgaggtgatgttttcactcaatggtctgggcttactgggctacgaagcgaccgtctcgcgcgattatcctgtaatgtttggtaccttgtatattttcaccctgattggcctgctgctgaatattgtcagtgatatcagctatacgctggttgatccgcgtattgattttgagggacgttaatgtcgcgactcagccccgtcaatcaggcccgttgggcgcgttttcgtcataaccgtcgcggctactggtcgttatggattttcctcgtcttgtttggtttgagtttgtgttctgaacttatcgccaacgataaaccgttgctggtgcgttatgacggcagttggtatttcccgttattgaaaaactacagcgaaagcgattttggcggcccgctggcaagtcaggctgattatcaggacccgtggctgaaacaacggctggaaaataacggctgggtactgtgggcaccgattcgctttggtgctaccagtatcaactttgctaccaataagcccttcccttctccaccctcccggcaaaactggctgggaacggatgccaacggcggcgatgtgctggcacgcattctctatggcacgcggatctcggttctgtttggcctgatgctgactctctgttccagcgtgatgggcgtgctggcgggggcgctacaaggctattacggcggtaaagtcgatctctggggacaacgctttattgaagtatggtcggggatgccgacgctgtttttgattattttactttccagcgtcgtacagcctaacttctggtggctgctggcaattactgtcttgtttggctggatgagtctggtcggcgtggtgcgggcggagtttttacgtactcgtaatttcgactacattcgtgcggcacaggcgcttggcgtcagcgatcgcagtatcatcctgcgtcatatgttgcctaatgccatggtcgcgaccctcacctttttaccgtttattttatgtagttcgataaccaccctgacctcgctcgatttcctcggcttcggtctaccgctcggttcaccgtcactcggtgaactgctgttacaagggaaaaataaccttcaggccccgtggcttgggatcaccgccttcttgtcggtggcgatattattgtctttgctgatctttattggtgaagccgtccgcgacgcatttgatcctaataaggcggtgtagcatgacgcaaactctgttagcgattgaaaatttgtcggtgggttttcgccatcagcaaaccgtacgtacagtagtcaatgatgtttcactacagattgaggctggcgaaacgctggcgctggtgggtgagtcaggttcaggcaaaagcgttaccgcgctgtcaattttacgcctgctcccttccccgccggttgaatatctctccggcgatattcgttttcatggcgaatcgctgcttcacgccagcgatcaaacgttgcgcggtgtacgcggtaataagatcgccatgatttttcaggaaccgatggtgtcgttaaatccattgcataccctggaaaaacagctttatgaagtgctttcactccaccgcgggatgcgtcgggaagcggctcgtggcgaaattcttaactgccttgatcgcgttggtatccgccaggcggcaaaacggctgacagattatccgcatcagctctccggcggcgaacggcagcgggtgatgattgcgatggcgctgttaacgcgaccggaattattaattgccgatgaaccgaccaccgcactggacgtctctgtccaggcgcagattttacagctgttgcgcgaactgcaaggcgagctgaatatgggcatgctgtttattactcataacctcagcattgtcagaaaactggcccaccgcgtggcggtaatgcaaaacggtcgctgtgtcgagcaaaattacgccgctacgctatttgcatcacccactcatccttacacacaaaagctactcaacagtgaaccgtcaggcgatccagtgccgttgccagaacctgcctcaacgttgctggatgttgaacagcttcaggttgccttccccattcgcaaagggattttgaagcgcattgtggatcataatgtggtggtgaaaaacatcagttttacgctacgagcgggtgaaacactgggtttagtgggcgagtccggttccgggaaaagtacgacgggactggcgctgctgcgactgattaattctcagggcagcatcatctttgacggtcagccactgcaaaatttaaatcgccgccagctgttacctattcgtcatcgcattcaggtggtatttcaggatccaaactcctcgctcaacccacgactcaacgttttgcagattattgaggaaggcttacgggttcaccagccgacgctttctgccgcacaacgcgaacaacaagtgatagccgtgatgcatgaagtgggattagatcctgaaacacgccaccgttatccggcggagttctctggtggtcagcgacaacgtattgcgattgccagggcattaattcttaagccctcgctgatcatacttgatgaaccgacatcatcactcgacaaaacggtacaggcgcaaatattgacgctattgaaatcattgcaacaaaagcatcaactggcctatttgtttatcagccacgatttgcacgttgtccgcgcgttatgtcatcaggttatcatactgcgacaaggggaagtagtggaacaaggaccgtgcgcgcgcgtgtttgccacaccgcagcaggagtatacgcgtcagctactggcgttgagctgacgcttaaaaaggattgtagtttgaaaagggttcggcaattgccacaccaaaatttttcaatcggcatgttgcagcaaactcgtcctggcgatttacaaacaggcacggctcaccttcacactccagcaccgaacatggaacttcgatgtcgcttaacgcctggcttagtttatacatcaccgaccatgcattatcaccatccgggctaagcaatttaagcgccaccaggctgttgtcaccgcacggtccattttgcggaatcggttcaaccttcgaacctgcgaaaccagcagaccagcgatagttctgcggcagtcgatggacgattgagagttgtaatgaagtcacttattttccccggaagcacattcacttcacaatttgtttacatcaattttaacacatcatcaacaatccgtctttatacagatcgtaaagattgatgcctcgcctgcgtggcctctatggctctgatttaagtaatatctgcgggcgtggtcacgtttgcggggctatatgtacccgtttctgcgatctaactcaacctttttaactacaatgatgtgactttttacataaattgattttacataaaataaacatatatcgggggaatgatagatttgtggttgacatgcatcaacaaaggaagccttttagcttcctcgttgtgcaatagatcaccgttttttcggccgactggcgtacagacagaagagaatggagctggttgcgcagaatgcaattgaccaaatcatcggccatgcagagttaaaggtcgcaagagaaagcaatgcgccaacaattgcccctatgccaaaacggaaggttcctgccagcgaagatgccgttcccgccatatggggaaactcatcaagaatgaccgccatcgcattggatgacaccatcgacacgcagcccacaaacgccgcaacgccaaccaccagcgaccaaaatcccagccccagcagcgcactgatgaccatccacgctgccataataaattgtatccacaaccccgagcggaacatatttaacgcgccaatgcggcggacgaagcggctgttaaagatggtcatcacgaacagaaaaacaatgtttagcgcaaagtaataaccaaagttttccggcgcgacgtggttaatttcaatataaacaaacggtccggcgcttaagaatgagaacatcccggcaaagctgaaaccactggcaagcatgtagctcaggacacgtttatggcggaacagcgccgcaaagttaccaatagtggtacgaatgtgaaatggctgacgacgctccggtggtaaggtttctttaatcaggaagaaaatcattgccgaagccagaatcgccgctaatgccaggatccagaagatgtaatgccagctcagccacaccagcacccagccgccaactatcggtgccatcagcggtgcaatggttgtcaccagcatgacaaacgacatcatccgcgagaactcttctttcgggtaaatatcgcgcatcagggcgttaatgaccacgctggccgcagccgcagccagcccgtggaagaaacgcatcacaatcagctgatcgatggtgtttgccaacgcacacgccaccgcggcggcggcaaacaccagcgtaccgccgagcaccaccggcttacgcccgaagctgtctgccatcggcccgtagattaactgccccaacgcaaagcccagaatataagtactgagggtcatctgcgtactgcccgccggtacgccaaactgcgctgaaattaccggtagcgcgggcagatacatatcaatcgacagcggcatcaacatggccagcaggccaaggataaaaacaatagcaaacgacgaatgctgtcgggtggtcacaacgggctcctgaaagtcattgaaaagttagacgacgctggcaatttcttcttcagttaacggacgatattcaccgggggctaaatcagcatccagcgtaataccgccaatacgttcacgatgcagctcaaccacgtggttacccacggcggcgaacatgcgtttcacctgatgataacgcccttcgctgatggtcagacgaacctgcgttggggtaatcacttccagcaccgcaggcttagtgagatctttttcgttatgcagctgcacgcctttagcaaattgctctgccgtatcgtcagctacaggtgattccagtgtcaccagataggtcttctcgcaatgatggcgcggagaagtaatgcggtgcgaccactgaccatcatcagtcatcagcaccagaccggtggtatcaatatccaaccgccccgccgcatgcagtttccacgctaccggttcatcaagaaaatagagcaccgttgggtgatcagggtcgtccgtggagcaaacatagccctgaggcttattgagcatgaagtaacgtggaccgtgttgctgcgccagcgggttgccatcgtaagcgacatcatgttcaggaagcagtttgaacgctgcattacggacgatttcgccatcgacggtgacacgattgccgcggatttcacgcccggcaatagcacggctaacgccgagttgctgtgcgataaatttatcaagtcgcatgtgtgtgattttgcctgtaaaaacggaggtcgggcattgacccgaaaatctgaactgttgtctgcccagtatagcggtctaataacatccctcaagggaaaaagatccatggcatactattagcagaataatctacctacgcgagaccatgatttttacacttcgcccatatcagcaagaagccgtggatgccacgctcaaccattttcgtcgtcataaaacccctgccgttatcgtgctgcccaccggcgcaggtaaaagcctggtgatagcggaactggcacggctggctcgtggtcgcgtgctggtgctggcacacgttaaagaactggtggcgcaaaaccatgcaaagtatcaggcgctggggctggaagccgatatttttgccgccgggctaaagcgcaaagagagccacggtaaagtggtatttggcagcgtgcagtctgtcgcccgtaatcttgatgcctttcagggtgaattttcgctgttgattgtcgatgaatgtcaccgtattggtgacgatgaagagagccagtatcagcaaatcctcactcacctgacaaaagtgaatccccacttacgcctgctggggctgactgccacgccttttcgattgggcaaaggctggatctaccagtttcattatcacggcatggtacgcggcgatgagaaagcccttttccgtgactgcatttatgagctgccgctgcgttatatgattaaacacggctatctgacgccgccagaacgactggatatgccagtagtgcaatacgatttcagccgcttgcaggcacagagtaacgggctgttcagcgaagccgatctcaaccgtgagctgaaaaaacaacaacgtattaccccgcacatcatcagccagattatggagtttgctgcaacgcgcaaaggggtgatgatttttgccgcgacggttgaacacgcaaaagagattgtgggattactgcctgccgaagatgcagcactgattactggcgacacccccggcgctgagcgcgatgtgttaattgaaaattttaaagcccagcgttttcgctatctggtcaacgtcgcggtactgaccaccggatttgacgccccgcacgtcgatcttatcgccattctgcgccctaccgaatcagtgagtctttaccaacaaattgtcgggcgcggtctgcgtctcgctccgggcaagactgattgcttaattcttgattatgcgggtaatcctcacgatctctacgcgccggaagttggtacaccaaaaggcaaaagtgacaacgttccggtacaggttttctgccctgcctgcggttttgccaacaccttttgggggaaaacgaccgccgacgggacattgattgaacactttggtcgtcgctgtcagggatggtttgaagatgacgacggtcatcgcgaacaatgtgacttccgtttccgttttaaaaattgcccgcaatgtaacgcggaaaacgatattgccgcccgccgctgccgcgaatgtgacaccgtactggttgatccggacgatatgttaaaagcggcgctacgactgaaagacgcgctggtattacgctgtagcggcatgtctttgcaacatgggcacgacgagaaaggcgaatggttgaaaatcacctattacgatgaagacggcgcggatgtgagtgagcgtttccgtctgcaaacacctgcccagcgtaccgccttcgagcagctttttatccgcccgcatacgcgcacaccgggcatcccgctgcgctggatcaccgccgccgatatcctcgcccagcaagccttattgcgacacccggattttgtcgtcgcccgcatgaaaggccagtactggcaggtgcgtgaaaaagtgttcgattacgaaggtcgttttcgtctggcgcacgaattacgcggttaatggtagttttgattgatgtataaggcgattgagtatagaatctcgcccgcttttgcatacgcaaagcagatcacttacctgttgctgggtcgcctgtagcaggattaatttaagagagaaagaaatgtttactatcaacgcagaagtacgtaaagagcagggtaagggtgcgagccgccgcctgcgtgccgctaacaagttcccggcaatcatctacggtggcaaagaagcgccgctggctatcgagctggatcacgacaaagtcatgaacatgcaagctaaagctgaattctacagcgaagttctgaccatcgttgttgacggtaaagaaatcaaagttaaagctcaggacgtacagcgtcacccgtacaaaccgaagctgcagcacatcgacttcgttcgcgcttaattgctgaataagttgtaaaaaaccccgctccggcggggttttttgtatctgcagattatgcctgattacggtattgctattttttgcaggccagataaggcgttcacgccgcatctggcattcagaacacaaaaccgattaattgccgccagacgtccggcgctgcaattggtcgcgcaaattcggcggcgtgcctttaatggtcaaggtatcggttgctggatcccagaagatgcgttcacctaacagcatcgcatcaaagttaatagtcaagccaccgccgctaccggcaaacttcgtcaactgacgcagtgtgctacggtctgccgggaagctctcttccagttcgtagcctttttcagccgcaaactccgtgaagctcacttcgcttacgcctgccagctctttcgacagcgatttcagttcgatctcttcgcctgcctgcagctgctcattacagtagctataaacctgctggcgcacgttctgtcgctctgctttatccagttgtgcttcggcagtgaaatcatcaaccgcttgcaacagcccacggttttgcgctttcgcgtttaacccttcgctggccccgaggaaatccataaagaaatccgccactttgcgccctactcgccctttcaggaaagtgagatagcgggtggactctggattggtttcccattcggttaaatcgatacgcgcaacaatatccgcatgattgatatcaagataatgggttgggttgatgtcgagattttcgttaacgcgcatactgctcaggttgctcagaactgccaccagcaaatactccaccgccagatagcgatagtggcaaaacagcacgaatccaccgtcagcaaaaggatatttcgctaattcgtcacgcaggcggccggttgccgcgcggctaaatgccaggaagtcctcttcgccctgacgctgtaagcgcagcgtctgcgccagttcactctcttcgctaaacaagccgtaagctttatttttggcgctatagacccgatgcagttctgccaccatctcaacgacggtttctgtcggttccagcaatgaatcgcgcaacaccagctcaaggttctgctcatcacgcttgataagctggtgcagagcaatctggttgatatccagactcatgataaactctcctttaagaccgggcggtattcaaccaccgccggttaagcgacgcaataaaagatggcggtcattttacagaaggcagcgtaacgagaatgatttaacgcataaaaaagcagaaaaaaaaccgttgctacggtaatatgttgccctttcatcaactaactgatttcgatttatgccacaaatttcccgctacagtgatgaacaggttgaacaattgctcgcagagctgctcaacgtactggaaaaacataaggctccgaccgacctttccctgatggtgttaggcaacatggtcactaaccttatcaacaccagcattgccccggcccaacgccaggcaattgccaactcttttgcccgcgccttacagtcctctatcaacgaagacaaagcgcactaagggaaacagataacaggttatggtaactcatcgtcagcgctaccgtgaaaaagtctcccagatggtcagttgggggcactggtttgcactgttcaatattctgctttcgctcgtcattggcagccgttacctgtttatcgccgactggccgacaacgcttgctggtcgcatttattcctacgtaagcattatcggccatttcagcttcctggtgttcgccacctacttgctgatcctcttcccgctgacctttatcgtcggctcccagaggctgatgaggtttttgtccgtcattctggcaacggcgggaatgacgctattactgatcgatagcgaagtctttactcgtttccatctccatcttaatcccatcgtctggcaactggttatcaacccagacgaaaatgagatggcgcgcgactggcagctgatgttcatcagcgtgccggttattttattgcttgaactggtgtttgcgacgtggagctggcaaaagctgcgcagcctgacgcgtcgtcgacgcttcgcgcgcccgctggccgcattcttatttatcgcctttatcgcctcgcatgtggtgtatatctgggccgatgccaacttctatcgcccgatcaccatgcagcgcgctaacctgccgctttcgtacccgatgacggcgcgacgttttcttgagaagcatggtctgcttgatgcgcaggagtatcaacgccgtcttattgagcaaggtaatccagacgccgtttccgttcagtatccgttaagcgaactgcgctatcgcgatatgggcaccgggcagaatgtgctgttgattactgtcgatggcctgaactactcacgcttcgagaagcagatgcctgcgctggcaggttttgctgagcaaaatatttcgttcacgcgccatatgagctccggcaacactacagacaacggcatctttggcctgttctatggcatctcgccgagctatatggacggcattctgtcgacccgtacgcctgcggcattaattactgcgcttaatcagcaaggctatcagctggggttattctcatcagatggctttaccagcccgctgtatcgccaggcattgttgtcagatttctcgatgccgagcgtacgcacccaatccgacgagcagaccgccacgcagtggatcaactggctgggacgctacgcacaagaagataaccgctggttctcgtgggtttctttcaatggtactaacattgacgacagcaatcagcaggcatttgcacggaaatatagccgggcggcaggcaatgtcgatgaccagatcaaccgcgtgctcaatgcactgcgtgattctggcaaactggacaatacggtggtgattatcactgccggtcggggtattccactgagcgaagaggaagaaacctttgactggtcccacggtcatctgcaggtgccattagtgattcactggccaggcacgccggcgcagcgtattaatgctctgactgatcataccgatctgatgacgacgctgatgcaacgcctgctacatgtcagcacacctgccagcgaatattcgcaaggtcaggatttgttcaaccctcaacgccgtcattactgggttaccgcagcggataacgatacgctggcaattaccaccccgaaaaagacgctggtactgaacaataacggtaaataccgcacttacaacttacgtggtgaaagagtgaaagatgaaaaaccacagttaagtttgttattgcaagtgctgacagacgagaagcgttttatcgctaactgattaattataaatcagttagcgaaatatcttacttgcaatcggtgtggaaaacggtagtattagcagccacgagtcggcacgtagcgcagcctggtagcgcaccgtcatggggtgtcgggggtcggaggttcaaatcctctcgtgccgaccaaaaatcccaagaaaaaaccaacccttacggttggtttttttatatctgcaattaattcgataaacagaccgtgacacatcacagcctgtttattttctgttatcagaacgtccagaccacacccgcctgagtattccacggcgattctacccctgcgccattgccatagctgactgacaaatgaccgcttaacgtcggggtaaacgatgaccttataccagcctgataaacgccactggttccagccacatcattattaaatttgccatcgtcattaactttcacctggttagaatcggcgtattcctgacgcacggccgctttcagccagggttccagcgtcgtaccgttttgcaggtccatgtgatagcttaccgccgttcccgcttcagcgcgtaatatccgggtatttcccacatccgcgcgcatgccgtttgataacgtgtagtcctgaccatctgtggtaaagccggtaaaggccagatagggtctaacactccacaatccgtcaacccaacggaacccgctctcaacatgagcacccgcgccgttactattgtaatcgccaaacgctgttgccccattactcatcttgccatggatggtgttggcaaaacggtcaactttcaccaccccatcaacataggcaccgttctgatgctcccaaccggcataagcccccagggtatagctatcgatattacctttgccgccgcgatcaaaaccaatatcagaatgagagtaaccaaagatcaagccgcgaattgtactgctttcttcacgggagaaacggctatcgataccgagcgtcaggcccgtcaatgtttgctcaaaaccagctcccgcatcagtggtcacgttgttgcgggtgttaattgccgaactccacatcgccgtatcgtaactaacgccttttacgctaccaagacgctcacgcacggtgtccagttctgcatcaaataccagcggttgtgcggccgccatattcagcacatcagtggttgaaggggtaatttgcgcgcgattctctgccagactccagctatggttgccattatccagcaaggtatattcatacgtaccgatatcaacaacgcctccggcattgcccaacgtaaatgcagcatcaccgccgcccgttgttaccagtgtaaggctatctcctgctgccgggctggcaccggtgtccgtcacgaatattttgaaatcacctgttgcctgaccggtgacgttgagctgatcgctctgatgattagccatatcggtacgcatataaaaattgccgtttcccgacagggtattggtggtcaacgtaatgaaattttccgcacttgccgtcactgatgaacgagtcactggctcatccatcataatcacatttgcgtcagacatcgcaaggttggctaagttgaggagggtgttttggttcgtcgtagtgatatcggcaatgatggtccatacgctattttcgagcgaaacgtccgctttgctggtatccacggcaccatgcgttctaaaagaagcgccctcagaaaccactaccttacccaccaacattgcgggtgcataatttatttgcggcttcatgacctcaagaatgccatcattccctctgactgaaacgttaaccattgtgccagcccagacgttagcgcggccattgttgataaccatattttcagagatggcttttgaggaatacgtgatacttccattctgatatgatcgaccgagatcatataccgcatttgcctgcactttcgtaccagtatcctttcccagcgattgcatagtggcatgcttatcaaggatagtatcaatggcctgcgtgtcctccataacaatgagcccggaaccatcatccagttcataattttttgacacaccatcttttatactaaattggcctttactgtttggaccactcacttccagcgcattcgttgagacaattaattttccgcctgcttttttatcaacgccagttacagtcccgccatccataacctccagtaagccgccactatctacagtggtattataagcgaagtcattttcttcaactcgcaaacttccgccgttttccaacaacatattattagcaataccattcttgatatcgaactgaccgagacggtttgttccgaatacctccatggcccgcgtggttgttttaatagcaccgcctgctttctgatctaccgcaaatgcaaatcccccctctttaacctccagtagtcctcccttttcgatagcgacaaagacggcccccccatctttttcaacgattaagcgcccgcctttaatcgtggtatcattcgctgcgccataaacctgtagcacaccattattgagcgtagtctggtttgccgcgccacccatttgaacaatttgataaccgtcatttaatactgagtattctgcggcgccattcatttcaatgtactgataccctccgttaatttcagtattattacttacaccaaattcttttatatgctgttctccgccaggattgattttcgtattattggcggtcccataaaccagctggatatctttttccaggacaacaccatcaactgtctcaccatactcaacagttgatgccaatgctatgggtgaatataaggaaggtgcgaataagcggggaaattcttctcggctgactcagtcatttcatttcttcatgtttgagccgattttttctcccgtaaatgccttgaatcagcctatttagaccgtttcttcgccatttaaggcgttatccccagtttttagtgagatctctcccactgacgtatcatttggtccgcccgaaacaggttggccagcgtgaataacatcgccagttggttatcgtttttcagcaaccccttgtatctggctttcacgaagccgaactgtcgcttgatgatgcgaaatgggtgctccaccctggcccggatgctggctttcatgtattcgatgttgatggccgttttgttcttgcgtggatgctgtttcaaggttcttaccttgccggggcgctcggcgatcagccagtccacatccacctcggccagctcctcgcgctgtggcgccccttggtagccggcatcggctgagacaaattgctcctctccatgcagcagattacccagctgattgaggtcatgctcgttggccgcggtggtgaccaggctgtgggtcaggccactcttggcatcgacaccaatgtgggccttcatgccaaagtgccactgattgcctttcttggtctgatgcatctccggatcgcgttgctgctctttgttcttggtcgagctgggtgcctcaatgatggtggcatcgaccaaggtgccttgagtcatcatgacgcctgcttcggccagccagcgattgatggtcttgaacaattggcgggccagttgatgctgctccagcaggtggcggaaattcatgatggtggtgcggtccggcaaggcgctatccagggataaccgggcaaacagacgcatggaggcgatttcgtacagagcatcttccatcgcgccatcgctcaggttgtaccaatgctgcatgcagtgaatgcgtagcatggtttccagcggataaggtcgccggccattaccagccttggggtaaaacggctcgatgacttccaccatgttttgccatggcagaatctgctccatgcgggacaagaaaatctcttttctggtctgacggcgcttactgctgaattcactgtcggcgaaggtaagttgatgactcatgatgaaccctgttctatggctccagatgacaaacatgatctcatatcagggacttgttcgcaccttccataacgctgtagccaccagaacagatattgcggaacgacaaagagaaacagaaccagattgatgcattgagctttcatcctatgaaattaattgctgttaaaagcattgggtacagaaaatacccatagctccatacccggagtcagtttttaaaaactgtttaaagaaatgcacaagtattgtgattgattttttagttgtttttcttgatgagaagctgatgcaaaattccgtctttataatgaaaatgatgccaaagcgaacgacaaggttgtagttttcactacatgtccatacataaaatggggtaacattcacgcgcctggtagcgttaccaacgctacgctcaaacataatgattctaataaaacctcaggagactactatgcctgaagcaacaccttttcaggtgatgattgtggatgatcatccacttatgcgacgcggtgttcgtcagttactggagcttgatcctggctctgaagtggtcgccgaagcgggcgacggcgcgagcgctatcgatctggcgaatagactggatatcgacgtgatcttgctggatctcaatatgaaaggtatgagtggcctggatactctcaatgccttgcgcagggatggcgttaccgcgcaaattattatcctgaccgtatccgatgcctccagcgatgtctttgcgctgatagacgcaggcgcagacggttatctgttgaaagacagcgacccggaagtattgctggaagcgattcgtgccggagcgaaaggcagcaaagtctttagcgaacgcgtcaatcagtacttacgtgaacgtgaaatgtttggcgcggaagaagatcccttcagcgtgctgacggagcgcgagctggatgttctgcacgagctggcacaggggctgtcaaataaacagattgcctcggtgttgaatatttccgagcagacagtaaaagtacatattcgcaatctgctgcgtaaactcaatgtccgctcacgcgtggcggccaccattctgttcctgcaacaacgcggggcacaataaaaatagcccgatggatttatcatcgggctgagatttatgacaaacgcaaaactgcctgatgcgctacgcttatcaggcctacgtggatcgatcaatttattgaatttacacaattttgtaggccggataaggcgttcacgccgcatccggcataaactaagcgcactttgtcaacagtctagcccgatggcatcaccatcgggcctctttttatttactctcctgcggcgacaaatgttgcatcgcctgcgcgatactacgttcaatcaccgcacggcgagtatcgttggcaggtaagagtttcaacatcatctcccacgcggcaacggcttcgccaaatcgctgctgctcaaaggcattaaacgcatacatgcttagcacacggatattgctatggtccgttctcaccagctgacgtagcagttcaccgccgaggcggttgtcgttgggatcagatgaacgagtcaacgcttcagcgtatcccagtgcagcatcactgtttttcggatcgaggcgatacgcagtggcgtatgcatcggtggcgatactggcgttacccagcgccatgccaacgcggcccaacataatccagccttctatatctcccggatttttttgcagttgagtacgcatccccagcgcaagacgcgacatctcttcttcgttgagcggatcggctttcggatccagcgccctgtccagcaacgccggagcctgtgccgtggcctgctgccagattttcacctgctgataattgccagtctggtagtagctgacgccagccacaattaacgccaccacaatacccggcagataaacaacatatccggcacgcttaccttccggcacgctttgttcaggaaacgcttccggcaccacgcgtacccgacgccgcgagcgggcgtatatgacccaaccgccaatgccaatagccactactggcagcacccacagcagcacggtcagcggcgttaacggcggatcgtaagtgacgaagttgccgtaacgcgccaccatataatcgacaatctcttttttacttttaccttcctgcatcagttcatacactttctgacgcaggtcggtggcaatcatcgagttggaatcggcaatgctgttgttctggcatttcgggcagcgcagttcttcagtgagctgacggaactgttgttcctgtgcttcatctttaaactgcaacacatcgatggtcgccagcgctgagccggagatcatcagcatcagcacgcccaataaaaacctcattgtgcggcctccttactgtatttctcccacagcggcttgatctcttcttcccagacgcgaggattcagatcgcccgcatggcgatagcgaatgatgccgttgccgtcaataagaaacgtttctggcgcgccatagacaccgagatccagccctaacatgccatcgccatcaaacaggcttagcgcgtaaggattgcccagctctttcagccagctgattgccttctggcgatcgtctttatagttcatgccgaccacgcggatgccctgcgcagaaagctgattcagatattgatgttccgcacggcaggtcggacaccaggtcgcccagacgttaagcagtactggtttgccctgagtcagcacatccgcctgataaaactgccccggattgtccagtgattcgagacgaaacttcggcacaggcttgccaatgagcgccgattccagattggtcggatcatccccttcggcattacgcgccagctgccacagcagcgccgcggcaatcgccaggaagataatcaacggaattaacaatactttgcgcttcatacggcctccggcgcagttttttgcggactcacgcgcttacgatagcgaggatcaaacagacacagcagtccgcccaacgccatcatcagcccgcccgcccaaatccagcgaacaaatggtttgtagtaaagacgcacggcccacgcgccgttttccagctcttcaccgagggccgcgtacaggtcacgcgtgatgccgccgtcaattgccgcttcggtcatcatcgacccggcagtgttgtaataacgtttttccgcatacagcaccgtttccggcttgccatcgcgcgttacgccgatagtcgccacaccgccacgccagttcgggccagtcacctctttgacatcacggaaggtgaagcgatattcatgaatatcgacgctatcgccggacttcatgcgcacatcacgctcaacgctatagttctggctaaaggcaatgccaacaattgtcactgccagcccaaggtgagccgccaccatcccccaataactgaaggtggttttcgtgccgcgtgaaatacgtagcgcagcttccgcaattgccagcaccgcaatccagcaggccattgccaggccgagcaccgtcatcgccacaactttgctttcgaacagccacggcaacagcagcgacagcaccagcgtagagatgaaggcgataatcaataaattgcggatcttacgcgggcgatcccgcccccagcgcaccagaggaccgacaccaagcagtagcgcaaacggcaccatcagccaggtaaacatggtgttgaagaacggttcgccaatcgaaatactgcccagtcccagttgcttatgcaccaacggcagcagcgtccccagcaacaccaccagcatcgcagcgaccagcaaaacattgttcgctaacagcaaagattcccgcgaccacagcgcattgtttacgcgtgagcgaactttgtgtccacgcgcggcaaacagcagcagcgaaccgccaatcaccagcaccataaaggcgaggataaacataccgcgcgccggatcagacgcaaacgcgtgtaccgataccagcacgccggaacgcacgaggaaagtccccaacagacacaacgagaaggcactgattgccagcagtaatgtccacgctttgaagctggcgcgttgttcagtgaccgccagtgagtgcatcagcgcagtccccaccagccacggcataaacgaggcgttttctaccggatcccagaaccaccagccaccccagccgagttcgtaataggcccatgcggaaccgagcacgatgccgagcgtcaggaagatccacgctgccagcgtccacggacgagtaaaacgcgcataagtgctgtccagacgcccgctcagcaaagaagcaatggcaaaagcaaacgccaccgagaaacccacgtaccccatataaagcagaggcggatggaagatcagccccggatcctgcaatagcgggttaagatcgcgaccttcaatcgggaagttcggcaacgtgcgagagaacgggttagaggtaaagagaatgaacagcaaaaagccgacactgaccatccccattatcgccagtacacgggccacaatatccagcggaatacgctgactaaaaatcgccaccgcaaaggtccagccgctcatcagcagcacccacagcagtagcgagccttcatgcgcgccccaggtagccgccacgcgataccacaccggaagctgggtattggagttgctggcaacataggtgacggtgaagtcgttgaccacgaaagcattgaccagcaccagaaatgcgccagccacagacataaacagcagccaggcaaacaagcgggaagacgccatcatgcgcgcatctccgcgcgccacgccccatagcggatacacggacagcagcagcgcaattcccagcgccaggcacagcagtccgttaccaatttctggcatcatgatgctgggtccttataaacactcgccgggcgacggtggttagcttccatcgctttctcaacttctggcggcgtatagttttcatcgtgtttcgccagcacttctttcgcgaggatatgattgcctttttccagttcgccctgcaccacaacgccctgcccttcacggaacagatccggcaaaatgccttcgtaagagacatccactgagccttcagcatcgtaaatggtgaaggtcactttcagcgaattgggatcgcgctgcacactacccggcatcaccatcccgccaacgcgcagacgctgaccgacttccggcatttgctgagtttcacgcttgccgtagagaatttcccccggcgtataaaagagatcgatattcgagcgcagcgcatatagcaccagaccgatagtcagcgccagccctgccaacacggcacaggcaatccacaagcggtttttacggcgaatattcatgcagcctcctgctgttgcgcagcacgtaaacgcgcctcacgcgcccgctgttgcgccacgccacgcagaattgcgcgatgttgcatcaccgagtgcacgaccaaaaccaccagcggaataacggtcatcaccaccgccagccagacaaaaaaggcgtaaccgcccattgcgaaaaattcattccaggaagcaaatgcaggggtcatttacggcctcttttcagtatcagttcactcacccacggacggcgtttttccatcagcaaaatcaaattacgcatccgcatcagcgtcagcgtggcagacaggagcaggaagccaaaaatcgaccagcgcagcggcgaacgcatcgccggatcgatactttgctgcatccgcgttgatccctgatgcagggtgttccaccactccacggagtaatgaataatcggcagattcaccacgccaatcagcaccaggatacctgccgcacggcccgccagacggcggtcgtcgaaggcgtgccacagggcaatcacacccacatacaaaaacagcagcaccagttcagaagtcagacgtgcatcccatacccaccaggtgccccacatcggttttccccatgcagagccggtaaccagggcaataaaggtaaacacggcaccaatgggggccatcgccgccaccgccaggttggccattttcatctgccagacaaggccaataaacgctgccactgccattgatgcataaatgcccatcgaccagatcgccgcaggcacatgcaggtagataatgcggtagctatttccctgctgataatcagccggagcaaagccgaatccccagatccagccgacggtaagcacgaccacactggcaattgccagccacggtataaaccagccacagatttgatacagccgtggtgggatcgccagttgatgcagtgttttccacatagtttcgataccagactcgaacaaaaatcagtaatccagcgttattgaatgctgattcgtaacgctgccgccgtcgcaaaaggacttaatgtcgcggtgcctgccagcaacgcgcctaaaattgccagatacccgtcaacgggcaaatgcatagaagccgcgtccatcgcggcggtggcaaagatgagtaatgggatagtcagcggtaacaccagtatgctgagcagcacaccaccgcgcttaagtcccactgtcagcgccacgcccggtgcaccgagaaagccaagcgtaggcgttcccagcagcagcgtcagcgccatcacttgccagccataaacatccattcccagtagcattgctaccagtggcgaaaggatgagtaacggcagaccggttaccatccagtgcgccatcaccttcgccagcacaacggcgggcaagggtaacggcaacaacatcaattgttcaagactgccgtcctgcaaatcgtcacggaacagtcgttccagcgccagcaaggatgaaagcagcgcagcaacccagataatgcccggtgcaatacgcgccagcagttgcggctccggaccgatactgagcggaaaaagggtaattacaatcaggaagaaccacagcgggttggcgatttcggcgctatggcgaaacgctacacgcagctcaagacggaaaatgcgccagaacatcatgcggccctcgtttgcgtcagtgaaatgcggcgaattttactttcagcaacgttgagcggctggtgggtagtcagaatcacaatccccccctgctccgtatgctgcgccatacgctgggtcagacgatcgacaccgttaacgtcaatcgcggtaaaaggctcgtcgaggatccataacgtggcacgggtcagccacagacgcgctaaagcgacgcggcgttgttgcccggccgagagctgatttacaggaatatcttcgaatccggcaagcccggcctgcgccagggcttccagacattgtgcggtatcgccatcgcgatgataaaagtgcagattttctaacgccgtcagccgggttttgatccccggctgatggcctatccataacaggttttgatggtagctgtcgcgtacctgatgcaagggctgcccttgccagagaacctcgcctgcgtcagggcgagacaaccccgtcagcaaacggagaagcgttgtcttccccgcgccgttgctaccggtgatttgtacccactctcctgcgttcagcgtaaatgacaagccactaaataaggttcgttcatcccgctcacaaagtaactctctggcttcaagcatacccacgcaataaccctgttaaaaacctggctcgacttcacgcatatcgggcagcttgtgcgctatccctttatggcaatcaatacaggtttgcccatctttcaccgcctggtcatgcatcttcgcggcaaccgatttctgggcggttgtatccatatactcgaagttgtgacagttacggcactcctgcgagttattgtccttcatgcgccgccactcattctgtgccatcgtcagacgatgagcttcaaatttctgcggcgtgtcaataacgccaaaaattttaccatacagctctttacttgctttgagcttgcgtatcatcttcggcacaaactcgtgcggaacgtgacaatccggacaggtcgcacggacgccgctacggttgttgtagtgcacggaatccatgtattcctgatacaccgtgttgcgcatttcgtggcagctaatgcagaactcttcggtattggctttttccatcccggtgttaaagccaccccagaagacgatgccgccaacaaaaccgatcaacagcagcgtccccagcgccagacggctgggggtacgccaccatttccacaggcgcttaatcagaccaggcttacggtcagaatttcccataataacctcttatttcccgtaaccttttgatggggtaaaggtattccccacgattggcgcggtatcggcctgcggtacgtgacattgcagacagaaataacgacgcggagccacttccgcgcccactttgccgtcgctgtccataaagtgagtaggactgatacgcggcgcgccagtggtgcgatagctttcgacaccgtggcactgcaagcagcgattggtattggtcgttacctgataaccttcaacgctatgcgggatcattggcggctgattcacatagttcagcggcatccgatcctgctcttttggcatccgaatggccccttcctgtgtcccggatacttccggcgactggctaaaatcgacgccattagccgcccaaaccgcgccgcttaccaccagggccagcatcgccgtccattgacacagcgctttcttcaggtcatggcttttcatgatttcgctcccgaactccatcgtgtagttattgtaaatacatcctcagaacagacatccacgcagcgaccgcacgtcatgcaatcgcggctggtgacctgcaccgggctttgttcatccagcaccggggcacgtagcacatgcggttccgggcaaacatgaaaacaatccatacagcggttacatttctgccgatcggtggccgcaacggtaatcacacctttgctacccagcacgccatacagcgcgccaaccggacaaatgtgcccgcaccagccgtgttcaacgaccagtagatcaaataaaaacagcgcgagaataagcagcgcgccgctgccgaagcccattaccaggctacgccccatcagagaaacggggttgatccattcccaaatgagcgtgccagttaaggctgatcccaccagaatgaccaccaacagcacgtagcgaatgtggcgagggatcgtcgcagactgattgaggtcaaagcgcctgcgtaaccagttcgctaagtcggtaatcgggttcagcgggcagacccagctgcaaaataatcgctttcccgccagggcgtagagcacggtgataatcaccgcaccggtcaacgccaccgtggcaggcagatgaccactggcaagactttgcagcgtcatcagcggatcggtcagcggaacggtgtcgaataacaggctactgctgtagttgccgtgcaagatccacacaccaaaccatggaccgctcaaaaacatccccagcacgaagaactgacaaaggcgacgtaacaccagccaacggtgactgcgccaccagccttttttctccagcgcctcgcgcccggcgtcacgtttacgatttgccattgttcccctccagccagccgaagcggtaatggtgacctaactcccctttcgccagtgacagcggtaacaccttgattgccggttgttccagcacgcatactttttcgcacttaccgcaaccggtacaggcgtcgctgtgaaccgtcggcagaaagcgggcgtgcttaccggtacgcgtgttgcgctccagctccagggtgatggcctcatcaattttcgggcattcgcgataacaaacatcgcagcgcagcccctgaaagttgagacagttttcctggtccaccagtaccgccagccccatccgcgcgtcgtcgatcgattcaatctcacgatccagcgcaccgcttgggcacactttggcgcacggaatgtcctcacacatttcgcaaggaatatcccgtgcgacaaaatatggcgtgcccgccgacagaccagaggccagcgtcgccagttttaaggtgtcgtaagggcaagcctgaacacactgaccgcaacgcacacaggcactggcaaaggcgttctcgtttatggctccgggcgggcgcaaccgcacgccagatgcgcgtgcggtttgctgttgtaaccccagcgccacacccacggcagccagcccgcctgctgtgcgaacgacatcgcgcagaaagcggcggcgaccattttgaggtttcgctgaccgggacataatggcttacaccttctccagtttgaccgcgcacttcttgaagtccgtctctttcgagagcggatcggtcgcatccagcgtcagtttgttaaccaactgtgcggcgtcgaagaacggcatgtacaccaggccctgtggcggacggttacgaccgcgcgtttcaacaatcgagatcacttcgccacggcgagaaaccactttcactttgtcgccacggcgcagatcgcgcgctttcgcatccagcgggtgaataaacaggaccgcttccgggaaggcgcggtgcagttctggtacacggcgagtcatactgccggtgtgccagtgctccagaacgcgtccggtagagagccacaggtcgtactcttcatccggtgcttccgccgccggttcgaatggcagtgcgaagatcaccgctttgccatccggtttaccgtagaacttatagccttcgcccgctttcacgtacgggtcgttaccttcgctgtaacgccactgcgtttctttaccgttcaccaccggccagcgcagaccgcgcgctttgtggtagtcatcgaacggtgccagatcgtgaccgtgaccgcgaccaaaccatgcgtactcttcgaacagccctttttgcagatagaagcccagctcgcgggattcatcgttcagctgatcttccgccagttcggataccgggaatttgctcacttccggtgtggcatacagcacttcgtacagcgttttgccacgcagttccggtttcttcgccagcagatcttccggccatacttcttcagttttgaagcggcgggagaactggactaactgccagagatccgatttcgcttcgcccggtgcctgtacctgttgacgccagaactgagtacggcgttcggcgttaccgtaagcgccctctttctctacccacattgcggtcggcaggatcaagtcggcggccagcgcactgactgtcggatacggatcggagacgatgatgaagttgcgcggatcgcgccagcccggcatacgctcttcattgatgttcggcccggcctgcatgttgttggtacacatggtccagtaaacattcagtttgccgtctttcagcgcacggtcttgtgccaccgcgtgcagaccgattttcgccggaatggtgccgctcgggatattccacttcttctcgcagatatcacggtgtttctcgttggtcaccaccatgtccgcaggcagacggtgagcaaaggtgcccacttcacgcgcagtaccacacgcagaaggttgcccggtcagggagaacggaccgcaacccggctgggaaattttgccggtcagcaggtgcaggttgtagaccaggttgttagcccacacgccacgagtatgctggttgaagcccatcgtccagtaggagatgactttcttgttcggatcggcatacagctgcgccagttgttctaactggtctttcggcacgccggtcatttcggcagttttttccagcgtatactcggcaacgaaggctttgtaatcttcaaagctcatcggttcggaggcgtcagaacccggattcttcgctgctttttccagcggatgggtcggacgtaaaccgtagccgatgtccgtcgcccctttgcgcaggttaacgtgcttgctgaagaagtcctgatttatcgcattgttttgaatgatatagttggcgatgtagttcaggatcaccaggtcagattgcggcgtaaagatgatgccgttatccgccagctcgaagctacgatgctggtaggtagaaagcaccgccacggtgacgttctggttagagagacgacggttagtgatgcgcgaccagaggatcgggtgcatttccgccatgtttgcgccccacagcacaaacgcgtcagcctgctcgatgtcgtcatagcagcccatcggctcatccataccaaaggtacgcataaagccaactactgccgacgccatacagtgacgcgcgttcgggtcgatgttgttcgaacggaagcccgctttaaacagcttggacgcggcataaccttcccagatagtccactgaccagaaccgaacataccgatcgattccggccctttttctttcagggcggttttgaatttctcttccatcacatcgaaggcctgatcccaggtgattggggtaaattcgccttctttgtcatatttaccgtttttcatacgcagcagcggctgcgtcaaacggtctttaccgtacatgattttgggcaggaaatagcccttaatgcagttcaggccacggttaaccggtgcgtccgggtcgccctgacaggccaccacacgtccctgctgcgttccgaccagaacgccgcaaccagtaccgcagaaacggcacggcgctttatcccatttgatggcttcctgctgaccaacaacggcgcgggcaacgcccggcacgctgagaccggcagccgccgcagcggccgcaacggcgttagctttcataaagctacgacgactgagtttcatggtgtttcctcaccttgctcttcctgctggtgataaaccagcgacaccgccagcacgccctctacgttgcgtactgactcaatggtttggatcagcgtttcgctgtcttctgcttccaccaccacaatcaactgaccgctcggcgcgtcgctgacagcaacttcacagccgggaaaggcgttcagttgggtgctgatgtctgaaattcgttcgcttttggcctgcacgaccaggctgcaaacttgccagttagtgtgcatggagatactccgcagttatggctgataccggacagctggctgcacatgctccacatccgttgcaaagttggctattaagttgcggctggtagatcccggagagcgtcgggcgaaagataattgccattggctcacagctatcctgacagcggcggcattcaactgactgatacgccaggcacgcgtccccgatggtgaactgcaaatcccaggccctggtgtggcgcggagaaaatagcgattcggggcaagcctgcgcgcaggcgtaacagaagctgcactcgttatttttgaaattaacgctcggatagccgcccgcgccgcgttgcagaatgttgttttcacaagcattaatacaggcgtcgcagcgggtgcaatgggtcagaaaatgagattcatcaccggaccagggcggacggataccgttactggctttgcgccagcgaccagtgagtatgccccgacgggatgcatcaatcttcacattgaccttccatcattaacgcgctctgaaaattgagagcgaccaaataaaccgcataattaataagccatttttatagccgctaagatattaaaggatgtgtcaaagatgcataccccgatcggggtaaaacctgtagcaggatcaaaagagtggcgggaagcgtggcaaaaacgggcttttgctcacatttcaaatggttataaatatatttatatagcgattgattcaccagagatatttctgctggtttgctctctcattagaatttaacactaaaagagcaggtaaaattgtctgaatgttctttaagttattcataaagcaaattaataaatctgatgaatatgttaaccttcagcgacatcatcggtgaaaacctataaatgaagaaggaaagcaaaaaaatgaagaccattctacctgcagtattgtttgccgctttcgctaccacttccgcctgggcggcagaaagcgtccagccactggaaaaaatcgcgccttatccacaagctgaaaaagggatgaagcgtcaggtgattcagttaaccccgcaagaagatgaatctaccctgaaagtagaactgttaatcggtcagacgctggaagtcgattgcaatttgcatcgtctcggcgggaagctggaaaacaaaacgctggaaggctggggctatgattattatgtctttgataaagtcagttccccggtttcaacgatgatggcctgcccggatggcaagaaagagaagaaatttgtcaccgcgtatctgggcgatgctggaatgctgcgttacaacagcaagctgccgatcgtggtgtatacgccagacaatgtagatgtgaagtaccgcgtctggaaggcggaagagaaaattgacaacgcggtagttcgctaaactgccgtgaagtgcggcaccccgtaggtcagacaaggcggtcacgccgcatccgacatccaacgcccgagccggttgcctgatgcgacgctggcgcgtcttatcaggcctacaccgctgtgaagtgcggcaccccgtaggtcagacaaggcggtcacgccgcatccgacatccaacgcccgagccggttgcctgatgcgacgctggcgcgtcttatcaggcctacaccgctgtgaagtgctccaccccgtaggtcggataaggcggttacgccgcatccgacatctaacgcccaagccggttgcctgatgcgacgctggcgcgtcttatcaggcctacaccgctgtgaagtgctccaccccgtaggttggataaggcggttacgccgcatccgacatccaacgtccgagccggttgcctgatgcgacgctggcgcgtcttatcaggcctacaccgctgtgaagtgctccaccccgtaggtcggataaggcggttacgccgcatccgacatctaacgcccaagccggttgcctgatgcgacgctggcgcgtcttatcaggcctacaccgctgtgaagtgctccaccccgtaggttggataaggcggttacgccgcatccaacatctaacgcccgagccggttgcctgatgcgacgctggcgcgtcttatcagcatacgccacatccggcataccatgccggatgtggcgtatcattacaacgcaatatccgccacttctttttgaacgggttgcggtttcaactgcggtttcggcgtactatctgctgcctgcggcttgtcgtagttcaaccccagcacttcgctggtgtactgcaactcgcgttctgttgccgctacatcaccgttcagcttgcgtccataagacggaacgatcgctttcaacgtagcctgccattgcgggctggaaacacgatcgccaaatactttttccagcagattcaacataatcggcgcggcggttgacgcccctggcgatgcccccaggagcgcggcaatggttccttgctggtcactgacgacttcagtacccagacgcagtacgccacctttctcggcatcacgcttgataatctgcacgcgctgccccgcttgccacaaacgccagtcctcttttttcgcctgcggatagtactctttcaacgcttcaaaacgatcctcttcactcaacatcacctgactcaccagatatttcaccagatcgaaattatccagcccgacgtgcatcatcggcatcacgttagaggtggtggtggaactcattagatcccacaatgaaccgtttttgaggaatttggttgagaaggtggcaaatggcccaaacagcactacgcgtttaccgtccagaacgcgggtatcgatatgcggaaccgacatcggtggtgcgccaacggatgctttaccgtaaaccttcgccagatggtgattaaccacgtccgggttttccgaaacaaggaactgtccgcccaccgggaaaccggcgtagtctttcgcttccggaatccccgattcctgtaacagcttcagcgccgcaccgcccgcgccgataaagacaaatttggcacgaatgttctgtgcagtgccatttttcagatcggcaacggtaacggtccaggtgttatcgtcattacgctttagggcgcggacttcgctgctgagttgcagcgagaagttagatttcttctgcaaggaagcaattaactggcgggtgatctcgccgtagttcacatcggtaccaatttccgtacgcgtggctgccactttctgttgcggatcgcgcccttccatcactaacggtgcccactctttgatctgcgcgtgatcttcagagtaacgcataccgcgaaacagcgagctttgttgcaacgcggcgtaacgggcgcgcaggaaattgacgttatcctcgccccagacaaagctcatatgcggaacggtattgataaatgaacgcggagtacgcagcacgccgcgctcaacctggtgcgcccagaactggcgggaaatctgaaatgcttcgttaatggcgactgctttttcaatactgatgctgccatcggcgttttgcggggtgtagttcagttccatcagtgcagaatgcccggttccggcgttattccagccgttcgaactctcctgcgcgacaccctccaggcgctccaccatggtcatcgaccattcaggctccagctcgcgtaaataggtccccaacgtggcgctcataatgccgccgccaatcaacagtacatcagtttcctgctcctcggacgctttcgcttttgccgccatcgaaacggcattaagccccacggccatcgagaagagcatggcagtcacttttttcatcttgttaatgccttacttttagtcgctttattgcaggtgagatttgcgcggcatcaacggtaacacttaagtaacaacatttaaataatgtttataaattatattctaattttagaaacattataatttcgttgattaattatagggttattagaaatgaagggatttttagcatattgacctgacggcagcagtccgccaggtcagcgtcgtaatattatgccgtccgggcaacggcatcacgcgaagcggcatcgcgctcttcgcccgtcagctcgctaagttgcccattgcgcatttccagcaggcggtcggcgtggataaagtaatgatcatcatgactgatagcgaaaatagttttacccatctcctgcatcagcggcagcaacacctgataaaactcacgacggaagtgtggatcctgatccgccgcccattcatccagcaggataatatcgcgttcttctgccagcgccagcaacagcgccacgcgttttttctgcccttttgataacttcaggttaacaatacgcccgttgcttaactcaagcttatgagccattttcagctgcgccagccacttctcaaccagttgcgggttagcgggtttaccctccggccccagcagttgatcaaacagccagacatcggtaaacactgccgaaaacagtttgcgataatcttccggttgttcgccgctgacaggtttgccatccagcaagatttcgccgctttgtggctgatacaagcccgtcaacaacatcgccagcgtcgattttccgctaccgttgccgccaatcagaaacagcagctcgccacgtttgatggtgagattaatcggaccaacggaaaacgcgttatcctgataagcaaacgtcacgttacgcagctccagcgtttgccagttgggaaacgcctgcgggcgcggaaactctgctttgaaaggcgcgagcgcgaatttgttcagcttgttaaacgccacctgcgccgtcagcagcgtcggcaatgcgccaaccgccgaaagcagcggcgtacgcaggaataaaagcgtcaacgaataggtcgcggcaacgttggtatcagcccaaccgaggctgttcgccatccagaacaccaggccgattgcgcccagcatcatgatgtttgaccagttcacggcactaagatggaaggtgtctgcgcgaataatatggtggcgatactcttgcgcatcaggaatgtagaggttgttaaacacatactcggcgcgttcccggttcagagtcagctctttgcgcccttcaagtacagtttgaaaatccgtgtacagcttgtcttcggtttcacgcagggtcgccatatgtttgtacacccgcgccaccagcacaaaaccgccccagatggtgatcgccatccagatagccgttaccagcaacattttgcccgacagcatccacagatacgccgctgaaccgatagtgagaatgatcccctgcaccagttccggcagacgcacaaaagcaatggtgatattgcgcacatcgctggttaaccccgccagcaacgaggcgctaccgagttgttcaatgcgctcgacgtgagtatccagaatccgcttgataaattcactacgcagtcggtaaacgaagtgatgccccaaagtggtgagcgccagttgcgatccgagagtgactgccatcaacagcagcaataatcccagaaactccggcaacaccagcagactggtatccgccgtttcgataaggcgctgattgataaaagcaattaagccaatgcctaatgccgcactggcgaggcttagcgccatcacactgataaatggccagcgatactgccgccagacaagtacaagaagttccatgcagaaaacccggacaatgaattacagcccgcagtttaaacatcttcgcgcgcacagcaataataattcttatttttattcttttttacctgcctgacggaatgtcaggttgtagcggcagtcgatggtgagtggatgaaaccccgctttcaacggttgaataccgtgataaaacagccgcgattcaccgccccataccaccacatcgccatgttccaacaacaaacgtttgagcggatcatttcgtttcaggccgccaaattgaaaaatcgcgggtaagcccagagaaacagaaacaattggcgcgcgcagatccggttcgtctttatcctgatgcagcgacagtttcgcgccaggagcgtagcggttgataagacaagcatctggctggaaatctggatagcccgccgccgtagccgcacgttgacataaattatgaaaactctgtggcatggcgggccacggtttatttgtttgcggatcaatgggcgaatagagataaccttgccgatgggtcgtccagcccagatgcccacagttggtcatcgccaccgacatggtatatcccccgggggtgaccatctggcgaaacggcgactggctggcaacgtcattaatatcgcggatcagttgctccgcagcgttaaaagcaaaacgccgtaaaattaccgcaccagccgccagtggctcttgccacggttcagcatcggcaaacagatccaacattacctctcctcattttcagcttcgcggcgcagcagttgcgctttacgcgacacgccccagcggtaaccggaaagtgtgccatcaccacggaccacccgatgacagggtattatgatagccagcttgttggcggcacaggcgctggcaacggcccgtaccgctttcggtttgccgatggcgttagccagttgctgataactgacggtttcaccgcaaggtatcgtgcgcagtgcctgccagacttgttgctgaaaagcagtgccgcgaatgtccagcggtaacgtcagcggcgtatcgcgttgattgaggctggcgatcacttcacgcacatgttgctgaaacatcagatcggcaggcgcgttgtcggcagcgggaaacatctgctgcaactcgctgattagtgtcgcgtcatcatcgcccagcaatatcgcgcaaatcccccgctcgctttctgccaccaggcaacgacccagctcacaatcagccagcgcgtaacgcaccgccagattttcgccaccgtgacggaattgtttagccgtcatgcccagcgtttcgtcagctttgcgatagtaactgctgctgtcggggaatccggcgttaagaatagacgtcgtcacgctctcccctttcgccagcgattcgcgcaaacggcgagcgcgccaggcctgttgccaggctttaggcgtcattccggtagtcgctttaaacaaccgatgtagatgaaatggactcatcgccacctggtcggctaaggcttccagcgttacaggcgtttcctgttccagcagtcgacacgcgtgggtgattttatccaaccgatgttgctgggcattggctttttctggctgacaacgtttgcaggggcgaaagccagcggcgagtgcctcgctggcatttgcgtagaaggagacgttttcccgcaaagcatgtctggcgcggcaagacggacggcaaaagatgcctgtggtacgcacggcgaaaacgaattcgccgtcggcattcgggtcgcgggctaagacagattgccagcgttgatcgtcagttaagcatgtggcttttttcataatcagctccctggttaaggatagcctttaggctgcccggtcaccatcacgcaaaaaccaacaatcttgcgctttaatttttttcgctgacaaggaagcttttaaactgtggtgacatccaggttttaaagctatcgccttctttggtgatcatataaaccgccagcccttcccggcgaacaacctctttagctttctccggcccgagtaccatcaagccagtatcccaggcatcggcttccagcgccgtcggagcaatcaccgtcacggataccagattgtgttcgatgggacgcccggtttgcggatcgataacatgggaaagacgtttgccgtccagttcgtaatagttacggtagctgccagaggtgctaatcccatgaccgttgatatccaccacagcctgaaccgcgttttctttatcggttggtttttgaatcgctacccgccacggcaggccttcaccgttcataccacggctgttcagcgcgccgcccaccgacaccagatagcgggaaatcccttcctgctccatcaagcgtgccaaatgatcggccgcatagccttcgccgacggtggagagatcgacatataaatccggcaggtctttttgcagatattgctgatgcgactgattgatgaccgtcaggtgctgtaagccggttttggctttcatcgcatcgatctgttcctggctcggaatttgaaccggctgttgttccgggccaaagccccacagattcaccagcggcccgacggttatatccatcgcgccatcggtcttcgcgccaatgcgcagcgaggtggtgacgatatcggccatcgcttcacttaccggccacggcgataaactttgcgagtcgttaaagcgcatcagcgcggaatcttttttataggtcgaaagcagctgatcgtcggcgtccagttgggtctgaatcttttctttaagttcggcgctgcgtttggcgtcaatgcccgggatgctggcacgccagaaggtacccatagttttgccttcaagaacggtaacttcagtagcgtgggttttggcgggttgtggtttttgatcgcaaccaacaaagaagagcgcggcagccagcagtgccacgcgggtaaagcttatttccatacgtgattatcctcatgcgaacggtcgcaagagtacaccaaaaaactgagtttgtacgctgaaaacaatgaaaaaagggcccgcaggccctttgttcgatatcaatcgagattagaactggtaaaccagacccagagctacgatgttatcagtgttgatgccagcgtcacgagtgaactggttgtcgtccagcaggttgattttgtagtcaacgtaggtggacatgtttttgttgaagtagtaggtagcaccaacatcaacatatttcaggatatcttcgtcgtcgtagccacgacccaggtttttacctttagactgcaggtaagccagggacggacgcagaccgaagtcgaactggtactgagcaacagcttcgaagttctgtgctttgttcgcccaacccagggaacctacgcgagttgcgttgtaggtctgggtgtactgagcagccaggtagatgttgttagcgtcgtatttcagaccaccagtgtaggtttcagcacggtcgccgttaccgatgtaagcagcggtgttctgagcatcagtacgtttggagctggagatcgcaccaccgataccgaaaccttcgtaatcataagtgatagaaccgccgacgccgtcgccgttttgacgcagtgcgtcacgaccgttgttagttacgccactagtaaagccttcaccagatgggttgccgtttttaccctggtactgaacagcaaagttcaggccgtcaaccagaccgaagaagtcagtgttacggtaggtcgcgaagccgttaccacgctgctgcatgaagttgtcagaaccgtaggtgtcaccaccgaattctggcagtacgtcggtccaggaagttacgtcataaacaacgccgtagttacgaccgtagtcgaaagaacccacatcctggaatttcagacctgcgaatgccacacgggtccaggagttgttttcgttttcagcgctgttgccctggatctgatattcccactggccgtaaccggtcagctggtcagtaacctgagtttcacctttgaagccaagacgcatgtaggtctggtcgccatctacatctttgttgtcagagaaatagtgcaggccgtctactttaccgtacagatctaatttgttgccgtctttgttgtaaacttcagcagcgtttgctgcgcctgctaccagcagagctgggaccaggagggacagtactttaactttcatgttattaaccctctgttatatgcctttatttgcttttttatgccactgcatactgattaaccctcattaatcagtcggcaagtccattctccccaaaaatgcagaataatccaacacgaatatgatactaaaacttttaagatgtttcatttatcgctatagatgtttcaaaatgtaaatgcaagggaactttttaagattattgcggaatggcgaaataagcacctaacatcaagcaataataattcaaggttaaaatcaataacttattcttaagtatttgacagcactgaatgtcaaaacaaaaccttcactcgcaactagaataactcccgctatcatcattaactttatttattaccgtcattcatttctgaatgtctgtttacccctatttcaaccggatgcctcgcattcggttttttttacccttctttacacacttttcattattctgtgctaccacagaaaaactataacgcttgttaactatttcacaaataattaacatccgcataatttccagcaatctttgtttatttgcaattatttttgttgggctttttgtaggttatttgtacagcaaaatggcgcttgtacatctatttcccccaatgcaggatgataaatatcacgggagaatagagaatcatcaatcaggtaagagtctggaatttcacactgtaccctttatactgccctatcacttcgcgaagttttaacaggtcataaacacgaatgcgtcagaaagagacaacggccacgacccgcttttcactcctaccggggagcattacccgcttctttttactgttgatcattgtgttactggtgacgatgggtgtaatggtacaaagcgccgttaacgcctggctgaaagataaaagttaccagattgtcgacattacccatgctatccaaaagcgcgtcgataactggcgttacgtgacctggcagatctacgacaacattgccgcgacgacctccccctcctccggcgaaggtttacaagagacgcgcctgaaacaggatgtctactatctggagaaaccacgccgcaaaacggaagcgttaatctttggctctcacgacaactcaacgcttgagatgactcagcggatgtccacttatctggatacattgtggggcgcagaaaatgtaccgtggtcgatgtattacctgaatggtcaggataacagtctggtgctgatctcaaccctaccccttaaagatctcacctccggatttaaagaatcgaccgtcagcgacattgttgattcacgtcgtgcagagatgttgcaacaggccaacgccctcgatgaacgcgaaagcttttctaacatgcgccgcctggcctggcagaacggtcattactttacattgcgtactacctttaaccagccaggacatctggcaacggtcgtggcttttgatctgccgattaatgatttgatcccaccgggtatgccgctggacagtttccgccttgagccagacgcgacggcaacgggaaacaatgataatgagaaagaagggacggatagcgtcagtatccactttaacagtacgaagattgaaatctcctcggcactcaactctaccgatatgcgcctggtctggcaggttccttatggcaccttattgctggatacgttgcaaaacattctgctgccactgctgctgaacatcggtttgctggcgctggcgttatttggctataccacattccgccatttctccagccgcagtacagaaaacgtccccagcacggcggtcaataacgaattgcgcattttacgggcaatcaatgaagagatagtctcactgctgccgctcggcctgctggttcacgatcaggaatcgaaccgcactgtcataagtaacaaaattgccgatcatttgctgccgcatttgaatctgcaaaacatcaccaccatggcggaacagcatcaggggattattcaggcgacgatcaataacgagctgtatgagatccgcatgttccgcagccaggtcgcgccgcgcacacaaattttcattattcgcgatcaggatcgcgaagtgctggtaaacaagaaactcaagcaggcgcagcgtctgtatgagaaaaaccagcaggggcggatgatctttatgaaaaacattggcgatgcgctgaaagaacccgcacagtccctggcggagagcgcggctaaactcaacgccccggaaagcaaacaactggcgaatcaggcagatgtgctggtgcggctggttgatgaaatacagttagcgaacatgcttgcggatgatagctggaaaagtgagacggtgctgttctccgtgcaggatttaattgatgaagttgtgccttcagtgttgcctgccatcaagcgtaaaggtctgcaactgctgattaacaatcatctgaaagcacacgatatgcgccgcggcgatcgcgatgccttacgacgtattttgctgctactgatgcaatatgccgtgacctcaacgcaattgggaaaaatcacccttgaggttgatcaggatgagtcctccgaagaccgcctgacgttccgcattctggacacgggagaaggcgtaagtattcatgaaatggataatttgcacttcccgtttatcaaccagacccaaaacgatcgctatggcaaggcggacccgctggcattctggctgagcgatcaactggcacgtaaactgggcggtcatttaaacatcaaaacgcgggatgggcttggtacacgctactctgtgcatatcaaaatgctcgcagctgacccggaagttgaagaggaagaagagcgtttactggatgatgtctgcgtaatggtggatgttacttcggcagaaattcggaatattgtcactcgccagttagaaaattggggtgcaacctgtatcacacccgatgaaagattaattagtcaagattatgatatctttttaacggataatccgtctaatcttactgcctctggcttgcttttaagcgatgatgagtctggcgtacgggaaattgggcctggtcaattgtgcgtcaacttcaatatgagcaacgctatgcaggaagcggtcttacaattaattgaagtgcaactggcgcaggaagaggtgacagaatcgcctctgggcggagatgaaaatgcgcaactccatgccagcggctattatgcgctctttgtagacacagtaccggatgatgttaagaggctgtatactgaagcagcaaccagtgactttgctgcgttagcccaaacggctcatcgtcttaaaggcgtatttgccatgctaaatctggtacccggcaagcagttatgtgaaacgctggaacatctgattcgtgagaaggatgttccaggaatagaaaaatacatcagcgacattgacagttatgtcaagagcttgctgtagcaaggtagcctattacatgaacaatatgaacgtaattattgccgatgaccatccgatagtcttgttcggtattcgcaaatcacttgagcaaattgagtgggtgaatgttgtcggcgaatttgaagactctacagcactgatcaacaacctgccgaaactggatgcgcatgtgttgattaccgatctctccatgcctggcgataagtacggcgatggcattaccttaatcaagtacatcaagcgccatttcccaagcctgtcgatcattgttctgactatgaacaacaacccggcgattcttagtgcggtattggatctggatatcgaagggatcgtgctgaaacaaggtgcaccgaccgatctgccgaaagctctcgccgcgctgcagaaagggaagaaatttaccccggaaagcgtttctcgcctgttggaaaaaatcagtgctggtggttacggtgacaagcgtctctcgccaaaagagagtgaagttctgcgcctgtttgcggaaggcttcctggtgaccgagatcgctaaaaagctgaaccgcagtattaaaaccatcagtagccagaagaaatctgcgatgatgaagctgggtgtcgagaacgatatcgccctgctgaattatctctcttcagtgaccttaagtccggcagataaagactaatcacctgtaggccagataagacgcgttagtgtcttatctggcatttgcaccgattgccggatgcggcgtaaacgccttatccggcctacgattcccattatttcaacaaattacattaaagtaggccagataagacgcgtcagcgtcgcatctggcatttgcactgaatgccggatgcggcgtaaacgccttatccgtcctacgaatcccgcgatttcctgaccctctcggcatataacgtcagcgtctgttttatcacatccagcgttaccggcttcgacaggcagctgtccataccggactccagacaccgctgcttctcttcagccaacgcattagcagttactccgattaccggcaacgtcagtcccaactgacgaatgcgttgcgtcaagcggtaaccatccatatttggcatgttgacgtcgctaagcacgatatcaatatgattcttgctaagtacattaagcgcatcgacgccatcattcgcggttttacattgatagcccaacgatcccaactgatctgccagcaaacgccggttaatcggatgatcatccacgaccagaatcatcatatcgtcattatcgctgaccgctttgtccgttgacggcagagcgttagcaggatcgtggatttgcccctatatttccagacatctgttatcacttaacccattacaagcccgctgccgcagatattcccgtggcgagcgataacccagcgcactatgcggatgccattcgttataatgctcgaacgcctctgcaaggttctttgctgccgttaacccgtctggtttgggcatgatactgatgtagtcacgctttatcgttttcacgaagctctctgctattccgttactctccggactccgcaccgccgtgttcttcggttcaagtcccaacatccgggcgaactggcgtgtttcattagcccggtagcatgaaccattatccgtcagccactccactggagacgacggaagatcgttgccgaagcggcgttccaccgctcccagcatgacgtcctgtactgtttcactgttgaagccgccggtagtgaccgcccagtgcagtgcctcacgatcacagcagtccagcgcgaacgtgacacgcagtctctctccgttatcacagcagaactcgaacccgtcagagcaccatcgctgattgctttctttcacggccactctgcctgtatgtgcccgtttcgatggcggtacagcaggttttcgctcaagcaacagcgcattctggcgcatgatccggtaaacacgtttggcattgatcgcaggcataccatcaagttctgcctgtctgcgaagcagcgcccatacccgacgataaccatacgttggcagctctccgataacatggtgtatacggagaagcacatccgtatcatcagtgtgacgactgcggcggccatccatccagtcatcggttcgtctgagaatgacgtgcaactgcgcacgcgacacccggagacaacggctgactaagcttactccccatccccgggcaataagggcgcgtgcgctatccacttttttgcccgtccatattcaacggcttctttgaggagttcattttccatcgttttcttgccgagcaggcgctggagttctttaatctgcttcatggcggcagcaagttcagaggcaggaacaacctgttctccggcggcgacagcagtaagacttccttcctggtattgcttacgccagagaaataactggctggctgctacaccatgttgccgggcaacgagggagaccgtcatccccggttcaaagctctgctgaacaattgcgatcttttcctgtgtggtacgccgtctgcgtttctccggccctaagacatcaatcatctgttctccaatgactagtctaaaaactagtattaagactatcacttatttaagtgatattggttgtctggagattcagggggccagtctagatcgtcgctctccatctcgatcaaataaatacgcgccaacaatgccggtagctcatgcggagcagccacactgtgtacccactcccctggcgctttctccagcggaataccaatatggcgacgacagaaggtcactaccgctctgccctgccattttttactcactacctcgtcagtgatcaacacatcttcgggagtcggttcctgcccttcgtatgttgtaacgacgatgccgctgcgctgcaaactggtttccaggaactgacagagcgacgcattgcggaccgccagccagcagcgtttaccactcaacccttccacgccttttttctgcgggtactgagcgccgtacaacggaatacgcacggtaaactggctgcccattcccggttctgaatctaccgagatatcgccgtccatcatgctgatcagtttttcacaaatcgccagacccagaccggtcccctggaaattacgctgtacgcccgttccgacctggaagaagggatcaaacaagcgcaccacttctttcgccggtatccccacgccggtatcgcgaacacggatagagagataatcgccatccgcgcgaacatgcaaaactatacagccggtatcggtgaattttatggcgttactcaacaggttggagatgacctgctgtaaacgcatcgggtcgccatttaaggccactggcacatccggttcaataaagcagtacaagcctaactgcttgcgtaccaccagcggtaaatagttggcggtgatgtggttcatcacttcacgcggtgaaaactcacgcggttcgatcttcaactgttccgattcaatcttcgagaaatcgagaatatcgctgataattttcaacaacaggctggaagagttgttcattgccgtcaccagccgatcgacgcctttcggtaactctttggtttgcaacagatccaggttaccgataatgccatacagcggcgttcgcagctcatgactgacggtggcaaggaacatcgattttgactggctcgcctgttccgctgcttgtgccatctcctgcaacgactcttccatcttcacgcgcgaagaaacatccaccagcacacaaatggccacgttttcattacgatagcgcgaatggacgaagctgatttgcagattggtattgttgctggtcaggacatcaacaaaattgacctgctgcccacagataatttgcgtcagtcgttggcggtcctcatgcgtaagcatattgagataggtatgcgccagttcgttacttaaaatattgacgccatcagcggtacgcaaaatgcagatacccactggcgcggaggcgacaatcttgcgattgaactgctcatgttcttccagtcgcagggcgtcgctttccgccggaatgaaaatacgtcgctcgtacatccgtgcgagagtaaacaatgcagctccggcaagcacattcagcaaaattgcgttaaggatcaacatgcgaatgcgttccagcaccttatcaaccggcaccgaatacacgatgcttagcgatgagggtggcagatttttcttcagcaccagctcccggaacccttccgtatagccaaaccaggagcgttcctgcatccagcgaggatcgcccttaattttactttctggtccggtaagcgaaatcagggtatgaccattttcatcaagaatggtaacccccatcggcaacgtacccggtaagaaaaagttctccatccggatggtctgctcgacacccaaaagcgcctgcaaccggttcgccagataaactggcgtcaacgcgtaaaaatacccgacgccagggcgcggaccttcgctgatccagtagaggttactgccgctatcatcttgtggtgcatttcgatatttattgatgcgttcatgcaaagctttcaacgcggtatcgcgttccactggcatatcacgcagaccgaaattggccatgcagaggttatcgctgccgattaaaaatacccggtttagatcgtaagccgcagaaaaattatcgcgccagtagcgcataaaccacgccaatgactccagagaacctcgccaggtgttactcattgcggaacaatcggagtcggcaaacagcggttcaaacgcaggcacatccgcctgcgtttctcgtccacgcggggaaagcacaccgttttctgccgataagcgattttcggcgatgtacttcagctctttcatcacatcagaggtgcgttgaataaagcgctgagcctgatcggaactcagattaaattcctgacgaatttccgattctcgctgatgtaacgcattaacgatgtaaaaaacggatgaaaaagcaatcaacagccagagcactaacgccaatgctctgaacatgtagcgcgaggctttcagggttgtacgaaaagaagcaaggtatttcaaaggggcgaagctccgcctcaggtgaccgatggagtgtggttaaggtagcggtaaaagcgtgttaccgcaatgttctctcttctctggaatatgatacaccgccgagaaatcatcaccttaacctctgataatcgtcatataccggacaagactagtggatttcagcatgcattatatgaagtggatttatccacgccgcttacgcaatcaaatgatcctgatggcaatcctgatggtcattgtcccaacgcttactattggttatatcgtagaaacggaaggacgttcagcagtcttatctgaaaaagagaaaaaactttctgccgtggtcaacctgcttaatcaggcactaggcgatcgctatgatctctacatcgacttaccacgtgaggagcgtatccgcgcattaaatgcagaacttgcccccattaccgaaaatatcactcacgccttccctggcatcggtgctggttattacaacaaaatgctggatgcgataatcacctacgcgccttcagcgctatatcagaataatgtcggcgttaccattgccgcagatcaccctggtcgcgaagtgatgcgtacaaatacccctttagtttattcaggcaggcaggtgcgcggcgatattttgaattcaatgctccccattgagcgtaatggtgaaatcctcggctatatctgggccaatgaattaaccgaagatattcgccgccaggcctggaaaatggatgtgaggattatcattgtgctcaccgctggtttgctgataagcctgctgttgattgtccttttctcccgtcgcctgagcgccaatattgatatcatcaccgatggcctctcgactctggcacaaaatattcccactcgattaccacaattgcccggtgaaatggggcaaatcagtcagagtgttaataacctcgcccaggcactgcgtgaaacgcggacacttaacgatctgattattgaaaacgctgccgatggcgtcattgccattgaccgccagggtgatgtaaccaccatgaacccagcagcagaagttatcactggctatcaacgccatgaactggtagggcagccttactccatgttgttcgacaatactcagttctacagtccagtactggatacgctggaacatggcaccgaacatgtggcgctggagatcagttttccaggtcgtgaccgcaccattgaactcagtgtcactaccagtcgtattcataacacgcacggtgaaatgataggtgctttggtgattttctctgatttaactgcccgcaaagaaacccagcgccgcatggcgcaagcagaacgcctcgccacactgggtgagctgatggctggcgtcgcgcatgaagtacgtaatccgttaacggctattcgtggttatgtacagatcttgcgccaacaaaccagtgacccaatacatcaggaatatctgtccgtagtactcaaagaaatcgattcaattaacaaagttattcagcaattgctcgaattttcacgtccacgccacagtcaatggcaacaagtcagcctcaatgcattggttgaagaaactctggtactggtacaaaccgccggcgtacaagcgcgggtcgacttcataagcgaactggataatgaattaagcccgattaacgccgatcgtgaactgctcaaacaggtactactgaatatcctgatcaatgccgtccaggctatcagcgcacgagggaaaattcgcattcaaacctggcaatacagcgactcacaacaggccatttcgatagaggacaacggctgtggcattgatctctcgctgcaaaaaaagatcttcgatccctttttcaccaccaaagcctcaggaaccgggcttggtctggcgttaagtcaacgcatcattaatgcccatcagggtgatattcgcgtcgccagtttgccgggctacggcgcaaccttcacgcttattttaccgatcaacccgcagggaaatcagactgtatgactgctattaatcgcatccttattgtggatgatgaagataatgttcgccgtatgctgagcaccgcttttgcactacaaggattcgaaacacattgtgcgaacaacggacgcacagcattacacctgtttgccgatattcaccctgatgtggtgttgatggatatccgcatgccagagatggacggcatcaaggcactaaaggagatgcgcagccatgagacccggacacccgttattctgatgacggcctatgcggaagtggaaaccgccgtcgaagcgctacgctgcggagccttcgactatgttattaaaccgtttgatctcgatgagttgaatttaatcgttcagcgcgctttacaactccagtcaatgaaaaaagagatccgtcatctgcaccaggcactgagcaccagctggcaatgggggcacattctcaccaacagcccggcgatgatggacatctgcaaagacaccgccaaaattgccctttctcaggccagcgtcttgattagcggtgaaagcggcaccgggaaagagttgattgccagagcgattcactacaattcgcggcgggcaaaggggccgttcattaaagtcaactgcgcggcgctgccggaatcgttgctcgaaagtgaactgtttggtcatgaaaaaggtgcatttactggtgcacaaaccttgcgtcagggattatttgaacgagccaacgaaggtactctgctcctcgacgaaattggcgaaatgccgctggtactacaagccaaattactacgcattctacaggaacgggaatttgaacggattggcggccatcagaccataaaagttgatatccgcatcattgctgccaccaaccgcgacttgcaggcaatggtaaaagaaggcaccttccgtgaagatctcttttatcgccttaacgttattcatttaatactgccgcctctgcgcgatcgccgggaagatatttccctgttagctaatcactttttgcaaaaattcagtagtgagaatcagcgcgatattatcgacatcgatccgatggcaatgtcactgcttaccgcctggtcatggccgggaaatattcgagagctttccaacgttattgaacgcgccgtcgtgatgaattcaggcccgatcattttttctgaggatcttccgccacagattcgtcagccagtctgtaatgctggcgaggtaaaaacagcccctgtcggtgagcgtaatttaaaagaggaaattaaacgcgtcgaaaaacgcatcattatggaagtgctggaacaacaagaaggaaaccgaacccgcactgctttaatgctgggcatcagtcgccgtgcattgatgtataaactccaggaatacggtatcgatccggcggatgtataacaccaaaacttgctatgcagaaatttgcacagtgcgcaattttctgcatagccgctcattctccttataaatccccatccaatttatcccttcatattcaattagttaaataactaaatccaataatctcattctggcactccccttgctattgcctgactgtacccacaacggtgtatgcaagagggataaaaaatgaaaacaaaattgatgacattacaagacgccaccggcttctttcgtgacggcatgaccatcatggtgggcggatttatggggattggcactccatcccgcctggttgaagcattactggaatctggtgttcgcgacctgacattgatagccaatgataccgcgtttgttgataccggcatcggtccgctcatcgtcaatggtcgagtccgcaaagtgattgcttcacatatcggcaccaacccggaaacaggtcggcgcatgatatctggtgagatggacgtcgttctggtgccgcaaggtacgctaatcgagcaaattcgctgtggtggagctggacttggtggttttctcaccccaacgggtgtcggcaccgtcgtagaggaaggcaaacagacactgacactcgacggtaaaacctggctgctcgaacgcccactgcgcgccgacctggcgctaattcgcgctcatcgttgcgacacacttggcaacctgacctatcaacttagcgcccgcaactttaaccccctgatagcccttgcggctgatatcacgctggtagagccagatgaactggtcgaaaccggcgagctgcaacctgaccatattgtcacccctggtgccgttatcgaccacatcatcgtttcacaggagagcaaataatggatgcgaaacaacgtattgcgcgccgtgtggcgcaagagcttcgtgatggtgacatcgttaacttagggatcggtttacccacaatggtcgccaattatttaccggagggtattcatatcactctgcaatcggaaaacggcttcctcggtttaggcccggtcacgacagcgcatccagatctggtgaacgctggcgggcaaccgtgcggtgttttacccggtgcagccatgtttgatagcgccatgtcatttgcgctaatccgtggcggtcatattgatgcctgcgtgctcggcggtttgcaagtagacgaagaagcaaacctcgcgaactgggtagtgcctgggaaaatggtgcccggtatgggtggcgcgatggatctggtgaccgggtcgcgcaaagtgatcatcgccatggaacattgcgccaaagatggttcagcaaaaattttgcgccgctgcaccatgccactcactgcgcaacatgcggtgcatatgctggttactgaactggctgtctttcgttttattgacggcaaaatgtggctcaccgaaattgccgacgggtgtgatttagccaccgtgcgtgccaaaacagaagctcggtttgaagtcgccgccgatctgaatacgcaacggggtgatttatgattggtcgcatatcgcgttttatgacgcgttttgtcagccggtggcttcccgatccactgatctttgccatgttgctgacattgctaacattcgtgatcgcgctttggttaacaccacaaacgccgatcagcatggtgaaaatgtggggtgacggtttctggaacttgctggcgtttggtatgcagatggcgcttatcatcgttaccggtcatgcccttgccagctctgctccggtgaaaagtttgctgcgtactgccgcctccgccgcaaagacgcccgtacagggcgtcatgctggtcactttcttcggttcagtcgcttgtgtcatcaactggggatttggtttggttgtcggcgcaatgtttgcccgtgaagtcgcccggcgagtccccggttctgattatccgttgctcattgcctgcgcctacattggttttctcacctggggtggcggcttctctggatcaatgcctctgttggctgcaacaccgggcaacccggttgagcatatcgccgggctgatcccggtgggcgatactctgttcagtggttttaacattttcatcactgtggcgttgattgtggtgatgccatttatcacccgcatgatgatgccaaaaccgtctgacgtggtgagtatcgatccaaaactactcatggaagaggctgattttcaaaagcagctaccgaaagatgccccaccatccgagcgactggaagaaagccgcattctgacgttgatcatcggcgcactcggtatcgcttaccttgcgatgtacttcagcgaacatggcttcaacatcaccatcaataccgtcaacctgatgtttatgattgcgggtctgctgctacataaaacgccaatggcttatatgcgtgctatcagcgcggcagcacgcagtactgccggtattctggtgcaattccccttctacgctgggatccaactgatgatggagcattccggtctgggcggactcattaccgaattcttcatcaatgttgcgaacaaagacaccttcccggtaatgaccttttttagttctgcactgattaacttcgccgttccgtctggcggcggtcactgggttattcagggacctttcgtgatacccgcagcccaggcgctgggcgctgatctcggtaaatcggtaatggcgatcgcctacggcgagcaatggatgaacatggcacaaccattctgggcgctgccagcactggcaatcgccggactcggtgtccgcgacatcatgggctactgcatcactgccctgctcttctccggtgtcattttcgtcattggtttaacgctgttctgacggcacccctacaaacagaaggaatataaaatgaaaaattgtgtcatcgtcagtgcggtacgtactgctatcggtagttttaacggttcactcgcttccaccagcgccatcgacctgggggcgacagtaattaaagccgccattgaacgtgcaaaaatcgattcacaacacgttgatgaagtgattatgggtaacgtgttacaagccgggctggggcaaaatccggcgcgtcaggcactgttaaaaagcgggctggcagaaacggtgtgcggattcacggtcaataaagtatgtggttcgggtcttaaaagtgtggcgcttgccgcccaggccattcaggcaggtcaggcgcagagcattgtggcggggggtatggaaaatatgagtttagccccctacttactcgatgcaaaagcacgctctggttatcgtcttggagacggacaggtttatgacgtaatcctgcgcgatggcctgatgtgcgccacccatggttatcatatggggattaccgccgaaaacgtggctaaagagtacggaattacccgtgaaatgcaggatgaactggcgctacattcacagcgtaaagcggcagccgcaattgagtccggtgcttttacagccgaaatcgtcccggtaaatgttgtcactcgaaagaaaaccttcgtcttcagtcaagacgaattcccgaaagcgaattcaacggctgaagcgttaggtgcattgcgcccggccttcgataaagcaggaacagtcaccgctgggaacgcgtctggtattaacgacggtgctgccgctctggtgattatggaagaatctgcggcgctggcagcaggccttacccccctggctcgcattaaaagttatgccagcggtggcgtgccccccgcattgatgggtatggggccagtacctgccacgcaaaaagcgttacaactggcggggctgcaactggcggatattgatctcattgaggctaatgaagcatttgctgcacagttccttgccgttgggaaaaacctgggctttgattctgagaaagtgaatgtcaacggcggggccatcgcgctcgggcatcctatcggtgccagtggtgctcgtattctggtcacactattacatgccatgcaggcacgcgataaaacgctggggctggcaacactgtgcattggcggcggtcagggaattgcgatggtgattgaacggttgaattaatcaataaaaacacccgatagcgaaagttatcgggtgttttcttgaacatcgacggcgaaggtaaccccattaatcaccagtcaaaacttttcaccagcgtcagctcgccagcattacgcatcggtacaataaatgtttcctgtttctcattgaccgatccttcatcggtgatcagcgtcagttgggcggtggttaattccgtttcgctgcgcccaccatagtagttgatatacacctgatagcgcccgtgaattggcgcgggcatggcgaaaatctcgggtccgtaccccgtcgtgacatccatatccagtgcaccactgtttttcagcacggtgttaccgtaccaggcgtgttcgccatcgggcgtaacaacgtgaaggtcgaggtcggtattgtccgtatcccacgagagaaccagccgtaaacgtgcacgaatcgttcctgtacccggcgttgagtaaaactgcattttttgtcggctttgcccatccgggctgatgacctgcacgctgttgctgccttcagtgaaaatataagggcgtgcaaatgaaccatcggattcaattctctgcggcatactggcaccgttgaccaccagccggccctgctgaactttacccgccgcagcataattctttattttgccgcggatctgcgctgagatattttgatcatctgccatgttgacggacgacgccgggtaattgatcgattgtgaaaaactggcatcttcgccctctgccggatgccagcctgagagcggtgcatcaatctcgacttcctgcacaccttcactgtgagcgacaggcgaaagcgccaccagtaacaacggaagaaaaatctttcgcatagcattagtccattaataattgtcgggtcagcgtttcgatatagttctcatcaagcccggtgggataaccatcaaaggccaggtgcagatactcatgggttaaatccagccgatcctgaagcgtaaagaagttacgaataaacagccgtttctgctgccgatcggtataggggaaacctgagactaaacggcaaaccgcaaacacgtctggttcgttgtaccccgtctcagcttgtaatatacgccgccactgcggcatttttttcgccagccaggctttcgctttgggtaataactggcaggttgagcgtggcgctccccagcggctaagactgttgtcgggataagcaaacgcgagtatctgatcgtaacgctctccctgccccgcctgggccgtggcttgccgccaggaaagtgtcccttcggtagcgcgactgccatgataatgaaccggatcgcctgcatagatgagatcctgcgtccaggcggtcatcgttcgcgcccccgtggtcgctggcgaagcagaaacacgctgcgtggcgctgctgtcggggatggtcaggcaatcgccttcccgattggcgttttgctgtaaaaaagtgcgaatcgccacggtcatggctttcgctgcctcagggggcgtacttttcgcctcgcgatccagaactctggcaacgtactcttcacgatcgagatgcgactgcaatttcagtttgcccttttcgctcagtaaggtcgtctcaccgtggctgacaaacgtaatgtggttaccattagtaaacgtcacacgatagcgcccattaagtacgccgggatttactgccgtcgtactcttttccgctgtgattttcttcagcggatagcgggcaaacagctccacctctacacattgcccactggcaacctgcgtcggcactggcaaaacccgattaagcaccgtcgcataacgggttagtaccgttttgctggtgccactgccagtaacccacagcggtgtaccatcggttaaccagccagcaaaaccaccctgacggatttcctgtttatcatcggcaaaccagctccaggttttcacccgtacccgactaccgagcatggatgcgacaccgattttcgcctcgtccagcaccacatccagtaagacttcctgagctttgttttgcgcgggtaacgtcgctaatgaatcaagcagcgatttaaccgttaccgaggtttctggcttcagcgtagtcagagacgctaaccacgcaggtgcctgacgctgttgccagtattgcccccacacatctgcgccaatatgcaaccgctgcggcgcaaaatagagcccacaggaacgtaccagcgcggtatcgcgcgttatgctctccccagcctgacaacaataaacctcttccggggagtttccgcgacactggtagggctgctccggttgatgggtatcctccagccaggcgtaaacatacagtttccacaaactccctaacggcgtggtgagcgagtcaggtaatgctgagactttggtcacgcctgatgacgacagctgatacagttgatcgtgctgcgcaccgcgcagcaccagttgtaacggcgtctcctccgcaagtgttggcagagtaaccaacgccaatagccagacgattctgcgccagttcacttatttcacctgcatcccggtccattcactccctgccgcaacactttgctgcgcaggtgcataggaacgcacataacgagcaggaggcagaacgaattgccctttttgcgagaagcgcagcaaatggcggaaagtgaccgttcccgtcagttctttcaccggcaccatataggccagttcgcccatttcatttcgcgctttttccagcaattgcccctgctgtttcgcggcgttgggtttattgaccgaaatgccccatgttgtgcgctcaacgtcggctcccggtggcagcggtacttccacctgaccgtagcgcagaactgcatcctgctcgctggtaagcgtgatttcatcgagatacagcgcatcgctgtcaatctcattgctggtcaccggttgcagaataaagctcatctcttcttcaccagggataagccgatacaactggcgttcaacggtcaccggaatgttactttgttgagccatttttgccggctcacgtcagcggacctgcacattttgcggcgataattcgtcaccaaaagagagaatgtccggcacgccctgaccaacccaacgccagtcttcgccccctccagttaacttatgtttagcccatgcgcccgcaggcgcaggcaaaacaactggaggcattgtcgccatatatttcgccagccagttcatggccagcgcgcgctcaatagtggattgctcagcggtcaaaccacttaaaatagcggccgtctgggtagcgtcgccaccgctattaagcagcacaaccgtgtgcgccagcggctgattgctgtttgccgctttatcccacgcatattgctgaacctgtggcatcaccgtggacttcaactgcgcttttttcagcaacgtcatggttaagacgtttgccaccgcatctgccagtggagactccggtgtatcgaggatcaggctatcattgatatcgcgggtgtcttcctcagagaaatcttcagttttagttccgcgccgggcgatagcttcatccaaccctttcaacaacgttttgcacggcaaattcatctcctgcgcccatgccagcaccagcgcccgatgcaataacggcatgttatctgcctgctccgcgtagctgtcgagcatatgctgccagtattccggttgttgcgttacgccgatcgcctggctggcctgccagtcggcgtaccatgcccatgccgtaaggaaggcgtcaccattgccatcttcaccccaccaggtaaagcgcgctccgggccccgccagttgcatcagccgcagacggttatcctgaatcatctgacgaatgtcgttagcggcggcactttgatgatcggcaagcgaacgccaggcgagactgagcgggatcagacggctaccggtgttgattacgccaccccacggttcatcgactaacgcatcaagattgttgcggaaaatctcctgcggcgtttcactactttgtagccggatattgctcgcctgctcgggcaacatcagcgcgttatcgccaccaccgagcatgacatttttctgctgttcaacgggccagctgttatccacaaaagacagttttgtgctaatgctgtcctgcacttgcccattttgttgcagttctgcacttaacaagccagattgctgaatattctgcgtcagcgaaatataattcgcccctttgtgcagcgtcagcgtctggcgcatctcagcgcctgcaaatttagtcaccagcgccaccggttcgttatcctgctgactgaagataaacagtcctgccgccggtttgtcgcccacgcgatacaccgttggcatactccacttcatgtagagatttttttccgaacgcagataagcacgcccctgcccgaccagcccgtcgccgttcatcccacgcgcggtgatacgccagcgggttaacgaatcaggcatcaggaacgtgaaatacgctttgccttgtttatcggttgtgagtgacggcatccatgccgcggtatccacctcttcacgccgtggacgttcaagcatttttactcgccgctcgctgcggttagttgcgccaggcgcaaccggctcgctggagagcgcctggtcgtagctgataaacgacagactggagctggtacgcacattgttacgccccagcggatagaaaaatttgccgatattcggcgcgatttctggttgcagcgcgtagatcatttcatcgaccacgcctaccgttagctgcgcagaaacaggtttacctttcagcgacgaggttaattcgacattgaccagttcaccaggctggtaatgggttttgtccgttttcacccggatatccagctggggaacggcaactttgatcccggcgttctgaaaactgtactgaccgttacgggtatacagcaccgaaaaagtgatgttaggcgcaaaggaattgctcactggaacccgggcttcatactgggtatcgtttaaacgttgtagcgttagccagtttgccggatgcgaaagcagcgactgctgttccacgcgatcgcgttccagcgtcaataatgcttcatcaattggctccggaaaggtaatcagcatcttcgcggtttcgcctggctggtacagcgttttatccgccacgatatctaccgtaccagtatgcgccgtgctgcccttaccgctgacggcatgacttaacccagcgagaattaagccgtctttatcgcgtaatgtcagattgtagttgccaggtttagcgaaattgacggtaaaggatttgccgcctgacggtagctctccgctatggctcgtgcggtcttcgagacgcaaccattcatacgtaacaggaacctgttttgaagattccagcgcggcataacggaacacaaccgactcgccgctattactgtattgtgcggcagtacttaatgagtaatgcgccagaccgcgttcaatgaggatctctttggtggtggtgacgcgatacgccgcgccgtcactggcggagacggttaacaaatagcggctcggtttatcggcggcggggagatttaacgccacatgaccgctggcgtcggacaccgtttcgctgccttccagcgacacggggaaacgtccggcataacgcaaatcgttaccgaccattgataattgctgagcgcgcaaacttaactgcacgcgggcattttttaccggctcgccatccgggtagagcagttgcagtttgccgctgaccgcttcgccagttttgaactcttttttggcgagagctaaaccaatctcgaaatgtggcttgatgtagtttgccacgcgaaaactgctgctatagacctgattgcggtaagcaagacgtaactcataacctccggctacggcattttctggcaggcggaaacttccctgcccgccattgcgcgcatccagcgtgacattgacggtttgcaacagactgccgttggcgtccagcaccgaaagcttcgccggggcgctgacgatgggggatgaatgcaacggatcgtggaactcgcggccgatcactttaacatcgacacgatcgcctgcgcgatatagcgggcgatcggtaaaaatatacaagcgggtgttgtagatttcgctttcgtagaagaagttctcggagacaaaaacgccgccttcagcatccttacccagaatgtatgaacgttctggcgatatatgttgtaactgcaaggtaccgctgtcatcggtcacaccgcgggtcatcacgccaagaccgtcagtccacaagatctctgagccgggcttcgcttcaccctgttttttacccgcggtccacaccagaagctctttgcctgacactttgctaagcgccacggtatcggaaacaaacaccaccgtcgtcgcccgatacccaccaaccatcgcctcgacgaggtacagtcccggctcttgttggccgagaggaatataaatgttacccggctgcggcgagatgaaattgctggatgcgccttccagttttaccccttgctgcggctcgaacggtttagcctgccatagtggataacggaactgtttcaccaggggatattttttcagcggggaaaactggttgttctgtacataacgggaaggtttaataatggcattgccgagctgtaattcgggtaacgcctgagtcacattctgccgtgactgagaagagaaagtacgctgcatcacgcggcgagatttgccgtaccagttatcccacagccaggttagcgtattgttcagcccgtcgcccagatattgcggttgcaccacaatgcgatgcaggtttttctgctggcgcaaaaatgccatcgggtcaggaatacgatacaggcgaacgtccacgccgccgtactcttccatctgatagcgccgataatcacgccccggcgcttccagtcgcactttcgcctcttcactgctgctaaaactgctgtcagcaagcaaaaagaatgttcccccggcaggcggcgcatagttgctggaaggaagcgaatcatcagcattagcaagccctgttcccacaagagacagggacaagcacgctgctatcgcgccagaaaatttaaacgataaatgccaatgaaattgggattggaatcgttgggtatccatcgggtgtccttccatgtcataagttgttgcagactgactgcgcgcattccgttgtcagttttcgtggcgcttccggtgtggtagatgacgtaacgccccatccagaccattaagtgctgggcatcgccctgatcgaaaaaaatcatatcgccaggcagcgcctggtttatgtcctggccaataaactggctgttgtactgaatcaaattaatcgcggtcacataggggccggttttcccgttcccctgattccagttttgcgccagttgacgctgttcaggtgttagcgtcatctctggcggcaaatactggctagataaaccgttactttttagccatttactgtcgtgaactttcagcgtctcgttcgccgcaaatcgcaccaggcccgcacaatcctgctgataccagcgtggacttggcccctggcggagctgttcttgtgcaatgcgtacaaaccaggcgcgaaacagcccggattgttcgacattcagcatttcgctatgggcaacaacacaacacagccagcaaatcagcgccagcagcccgtgcctcatagcggctgccaggttatgggtagccactgccaggcggcaccgggttccatctgggccagcttcatgacataacgcggttgttgagataaagcgtccagcttcggcattaataaagtttgtgcggcgttataaaaaaccggttcgagattcttcggcagactggtcaacgtttcgttacgcagcagtttcgctattccttgtggattgatatagagcggaacgatgccatcagtgggtattacatccaccattgccgggcgggttttattcagtgtttgcagcgcgttattaaccagcgtgtcatcgagggagaaaagcagcgttttgttttgcatcgccagcgacacacggaaaaaataatccgacattaattgatcgggttgcgccgcctgcgctttcggatactggccgtatcgggaactcacttcgcgacgccagatttgcgcttcgccctgctgagtctggcttaccggcaaaacaccttctggcgctttgctttcgtgcgcaccaatattttgcgtaaacagtttccctggcaattgcgcctgttcggcagtgccatcaaactgaccgacaaacagcggggtttgcaattttgagtcttcataccagcacagccccgcggcaccgtctaacgccccattcagcttgtcgttttcctggctgatgtgcgaaagcatctcttcggcaataccgtgtgaatacggcaccgccacacagaagctggctccggcaggcatactgttccataccggcgtaaaatcgaaactggcatctacgctggcggattcatcatttaacgccacaaaactgtgccagccgtcgttacccatttcgaagcgtacgccagcaaaagaaggcattaaccgctggtagccaaaccccagccacctggcgctgactacgatgcgctggcgtactggcgttttttcggcagtacgctcttccaggccaaagcttgcttgccagcgttttttgccgctcaacaaatcacctgcgatcgccgtggcttcggtatcctgctgatcatctttaaacaacatatccgtgctggaaaacaccagcatcttgtcctgataagtcgcgaacatcagggcgttattgccgttatagcgcaactgataaacaggaacagtttcactatttatcttgatgctactgatttccgttttgcttaactggctgtcgctggtagcggcaaacaacaatggctccagcagtttgcttaaaccactgcgctggatcagcaccatataatgtgaaagatggccttgtttatcgtgccacagcgctgcctgcgcgggctgatctaagagtgacgaaaagagcttatctttcagcgtgagatcgtgttcatagacaatacgacgaatgctgccttcaatgcccagacgatcggcatgattctgataatagaaaacgaaatcttcgctcagaacatcgtggagaaacggaatggtgaggagatctttgggaagctggctcagagagtcgctgtcgagaaagaggtccggctcattgagatcgatttgcagattgttgtgcaccaccagcggcgacaacgttttttctggcccactgccagcatattgcaacgcccagacgccagcggaaagcagtgctattgcgccaaaacctacaagaccatagaaccgccagcctttcgcctttttttcaccactcattgccacattccttgtgtatagccagccattttttacgggcacagccaaactttaccgtgccctaatacgacaaaagcccagactttgcagcctggacttttcaattcaaacaagggagatagctcccttttggcatgaagaagtaaaattattcttcttctggctcgtcgtcaacgtccacttccggagcgatttcatcgtccccttccgcggcactgccgtcgatggtatccagatcttcctcgtcaaccggttcagcaacacgttgcagacccactacgttttcatcttccgcagtacggatgaggatcacgccctgggtgttacggcccacgatgctgatttccgaaacgcgagtacgtaccagcgtaccggcatcggtgatcatcatgatctggtcgcagtcatctacctgtaccgcgccaacaactaaaccgttacgttcggtaaccttgatggagataacccctttcgtcgcacgcgacttggttgggtattccgccactgcggtacgtttaccgtaaccgttttgcgttgcggtgaggattgcgccatcgccacgaggcacgatcagagagacgactttatcgccttcacctaagcgaataccgcgaacaccggtggtgttgcagcccatcgcacggacagaagactctttaaagcgcaccactttaccttcagcggagaacagcattacttcgtcttcgccgctggtcaggtcaacgccgatcagctcatcgccgtcaaccagtttgatcgccactttaccggcggtacgcagacggttgaactcggtgaggacagttttcttcacggtaccgttagcggtcgccatgaagactttcacgccttcttcaaactcggtcactggcaggatcgcagtgatacgttcgtcctgctccagcggcagcaggttgacgatcggacgaccgcgcgcgccacgagtggcttccggcaactgataaactttcatcgaatagacgcgaccacggctggagaagcacagaatatggtcgtgagtgttcgccaccagcagtcggtcgataaagtcttcttctttaatacgtgcggcagatttacctttcccgccacgacgctgcgcttcgtattcagaaagcggctgatacttaacgtagccctggtgagagagcgtcacgaccacatcttcctgggtgatcagatcttccaggttgatgtctgcgctgttggcggtgatttcagtacgacgtttgtcaccgaactgttcacgaaccagctccagctcttcacggatcacttccatcagacgatcggcgctaccaagaatacgcaacagttccgcgatctgatccagcagctctttgtattcgtcgagcagtttttcgtgctcaagaccggtcagtttctgcaaacgcagatccagaatcgcctgagcttgctgttcggtcaggtagtacagaccatcacgcacgccgaactctggctccagccattccggacgcgcagcatcgtcgccagcacgttcgagcatcgcggcaacgttgcccagctgccacggattagcaaccagcgcagttttcgcttctgcaggcgtcggcgcatgacggatcagttcgatgatcgggtcgatgttcgccagcgccacggctaatgcttcaaggatatgagcacgatcgcgagctttacgcagttcgaaaatagtacgacgggtcaccacttcacggcggtgacgaacaaacgccgcgatgatgtctttcaggttcatgatcttcggctgaccatggtgcaatgccaccatgttgataccgaaagaaacctgcaactgggtctgggagtagaggttgttgagcacaacttcaccgaccgcatcgcgtttcacttcaatcacgatgcgcataccgtctttgtcagactcgtcacgcagcgcgctgatgccttccacgcgtttttcttttaccagttccgcaatcttctcgatcaggcgcgctttgtttacctgatacggaatttcgtggacgataatggtttcacgaccggttttggcgtcaacttccacttctgcgcgagcgcggatatacaccttgccgcgaccggtacggtaagcttcttcaataccgcgacgaccgttaatgattgccgccgtcgggaagtccggccccgggatgtgttccatcagcccttcaatgctgatgtcttcatcatcaatatacgccagacaaccgttgatgacttccgtcaggttgtgcggcgggatgttggttgccatacctacggcgataccggaagaaccgttcaccagcaggttaggaattttggttggcatgacgtccggaattttttccgtgccgtcatagttatcaacgaaatcgaccgtctctttttcgagatcggccatcagttcatgggcaattttcgccagacggatttccgtataacgcattgccgccgcagagtcgccgtcgatagaaccgaagttaccctgaccgtctaccagcatataacgcagcgagaatggctgcgccatgcggacgatcgtgtcatagaccgccgagtcaccatggggatggtatttaccgattacgtcaccaacgacacgggcagattttttataggctttgttccagtcattgcctagtacgttcatggcgtaaagtacgcgacggtgtaccggcttcaggccatctcggacatctggcagcgcacggccaacaatgaccgacatcgcataatccagataggagctcttcagctcttcctcaatgttgaccggtgtaatttctctcgcaaggtcgctcatctaaccgctatccctctactgtatcccggattcaaaggtcgcaaattataacacagccgcgcagtttgaggtaaacctatacgctttattcacatccaatgcctgatatactcgtttgtcttgccaattacggagtagaagtgccaatgaatgccgaaaaatcgccggtaaaccataacgtagaccacgaagagatcgctaaatttgaagccgtcgcctcccgctggtgggatctggaaggtgagttcaaaccgctgcaccgcattaacccgctgcgtctgggctatattgccgagcgtgctggcggtttatttggcaaaaaggtgctcgatgtcggttgtggcggcggcattctggccgagagtatggcgcgcgaaggcgcgacggtgaccggtctggatatgggctttgagccattgcaggtggcaaaactgcacgcactggaaagcggcattcaggtggattacgtgcaggaaaccgtggaagagcacgcggcaaaacatgccgggcagtatgatgtggtgacctgcatggagatgctggagcacgtccccgatccgcagtcagtggtcagagcctgtgcgcaactggtgaaaccaggcggcgatgtctttttctcgacacttaaccgcaacggcaagtcatggctgatggcggtggttggtgcggaatatattttgcgcatggtgcccaaaggcacgcatgatgtgaagaagtttattaaaccggcagaattgctgggctgggtggatcagaccagtttaaaagagcggcatatcactgggctgcattacaacccgatcactaatacttttaaactcggccccggcgtggatgtgaactatatgctgcacacgcagaataagtgaggttgatgtttggccgcgccaatgcctgatgcgacgcttgccgcgtcttatcaggcctacaaatgctccccgtaggccggataaggcgtttacgccgcatccggcaaccgtgccgactagacagtgattaccatttcaccgtcatcgacaaaaaccctgccgtctgggcaaaatcatcactccctttctgccacgccacgctgccgcgcagggacactcgctgactgatattgcccgtgactcccacttttatttcaccccgttgcttcaccgcatcgtcactgatagtgctgccatcctcttcaatttccgtcgaatggggatcgtgataataattcagatctaatgttggtatgacatgaacagcggtacgccattcgctgtgtaaacccagccgcgtctgaatatcatcaccctgcgattgtgacacgcgcgcacggttagcggcggtaaaatcatcctgctgcacgccctgataaatcacctgcgcctgcggttcaatcaccacaccacgccccggtaaccactgataccccgcctccagcgaggcgataatccccgacgagtggtaatgatctgtgccatcttcttgttcggaaacatcattgctaaaccacgcgtattgcagccagctatccagccaggccccttgcttctgattaccgtgctgaaaccagcttgatgtcagcccaacggcataaccgtggttctggttatcggcgcgagttccggtcatattcgagcggctgtcgccctggttatcgctgtagccaccaacaatcccaagcatccactcgccatccgtgccccagcgcccgctaaacagatcgccgctaagttgcaccgtagaagtgtcttcatgttgagccagttgccccgctgctgtgtaatgataatctccgccgataacacgtaaattcagcgtctgaccatcgccacctgcgtgatcgcgtcgctccatcataaacgcctgatttgccgcccgcaggttattaagataaccgccaactttggcattcaacaccggctggtaagcaggcgtaggttccgggtcgggtgttggatcaggatccggcgtgggatcaggatcgggagtcgggtctggatcaggtggcgatggcggcgttacttcttgcgatcgcagataccagtcgttgttatcttccaccagcgtgtagtcatacgctcccatattgacgtagccgctgcctgccagactgaactgcgcattgttttgaaactgcgtgggatcagctgcgaaatcaaccactttaatgcctgtcgatgtcggctcaccaatccctgtaatggagttaaccaccacagttgtgttgccagcagtattaccgttcatcaccaattgatcgcttaccgagtcatcgccgtttaattcgctatcgagcagtagcgtaccgccgccggtataatcaccgtttaccgtcagcgtatcgccagcgacgccattttgcaggctaaccgcaccggacgtattggtcagattgccattaaccgtcacgttggaaagataagtcaggctgtcagtttcaaggttggtattaagctcacctgtcaacgtcacaccatcggtggcattcaccagcgtcccatcgccgttaaatagtgaggcattaagggcgacggaagtatcctgcccggtcaggcgcaaaaccgtaccatcgctgatgtcgatagtgccgctggaaatagcatcaattgactgaatatcctgatccgcgccagtaacgaacgttgccccatcaccaacccacagtgacgaagcataaggaaggatatcagcaacatcacctttcagggtgccttcttcgacacgtaccgccgactgcgttgtaccgctggcggtcagctccagtgtaccagcccccgttttagtcaatgtgctaccctcatcctgatgctgcccgctgctgtcagccatcagtgcgccccactgcgtgtctacccccgcatcaactgccacttcaccgtcggcgcgcatttcaatatcacgtccgtggcctgccgcatctgaacgcgtgtcaacgtcggaggtaatctccatcacgctttcttgttgcttatcggtaaagataacctggcggttatagtgggtatctccaagctgcgagttgtcgctcaccatcagcgtaccggaggcgatttgtgttgtgcccaaataactattattgtttgccagacttacctgcccgtcgctcgcatcgaccaccacgtagacgccatctttcccgtcgccgccgatatgcaaattgtcgccacctgcaagatctaccacatcctgactgccgataaccgttccgctgctgccactgacttcaaggccatcgttgtatgatgtgccgctctgccaggtggagaaatcagagagatcgagcacaccgccgtttaacacgatcgactgcggatcgtcctggagagcggtaagatctgccgcgtcgccttccagcgaaagcaccgcaccatcatcaacgactatatcgccggttagcgccatcgactgcgcccctgccagcacgtagctgccgttttgcgcaatggtgagctgaccagcaccttcgatgatgccagcaaaactgccctgattaacagtaacgttgccaccagcatcgatatttaaagtgccattctgaaagcccgtcaatgcgtgcacaaaagtttgttgggtcgagccaacgtttagctcagcctgattctgatactgatcaatactccctatcgtcagaccgtagcagtcttgcggatcgtcctggcaatgcgtatcgccgacattcatcagggagttgctgcggcccagggtaacttcaccgttttcaatctgcatctcaccagtaaagtcattgttatctgcattaagtaccagatcgccggaacctgttttggtgattaacccggtaccagcaatagagtcaacagctccgtcattctctgtattgccaataaccagcgtttttccgtcggcaatatcaaaggtaacttcacttaagccgagatacataaagccacccgccgcagaggaaggaccatctccatagcctgctgcgctattgttctcatcgactaacacgcctccgttctggctgtagctgtcatcaacagaaatatcaataagatagggagccgtcacgctattggtatatatcgccccgccataaccttcggcagtgttatttgtaaaggcagtgttatttactatcgtataacctgaaggatgcttgctgtcgctattattatcggtaacatcgattgccccgccatcgccatcactgtaacttgttgatgtatatgcctggttgttatcaaaaataacatcacttaaataaacgtcattattaatggtataaattgcgccacctttgccatcattagcgatgttattgcgaaacatggcgttagtgacacgtaaatcgacggcaccagtatcgttagtaccagaagaatagattgcgccaccatagccgcctgcgacgttaccggaaaaaataacatcagtaagattcagcgttgagttttctttagcaaatatggccccgccgttattatattctcctgtaacggtgttattggcaaacagagtcattccagtttcattttctggtaatagtgaaaattccgctccttgttgcaaaaatacggccccaccgctggcgttattggtcatatccgaaaaaaccagccattgcccatcagcgatactccagtcctgcgtaatgcctgaaaggctttgcctgctggcctgacaactcgctttgacatcatatccctggcatgaatcagtgaccgccgcgacaccgttagcagagaaaagagatgcaatcattgacgggagtaaagataaatactccttgcgtagaaagataatccgcatattaatctaaccatcattttctataagacggcgtatttaatcgcattatacgatatggaatatctttcttttgtaaattgttcaacccggtgcaatggctattttgttattatttgatgaataatatcagtgcgtcataattcaagttaataaccttcagggatatcagttatatttaaactaaattaaagtcatgaataattttcttataatataaggtaaattaacaaaatggcttagcatttaacaataaccgaatagaaaacaaccatttcgccatcaacaatctcttacattcgcttatatattgaccacaactgatacatcagattatgtgatgactcgtgcttagatcaatttttgcaatcattagcaaaaagattaataagccatctatatcaatttatctaacctattatgccgttcaagaaatcgccgaacagttatttttaacaaatttttctcttcccattgactttcccggacaccttgtctgacctaaggtgcgcgaaagccactttttccttcctgagttatccacaaagttatgcacttgcaagagggtcattttcacactatcttgcagtgaatcccaaacataccccctatatatagtgttctaagcagcttcccgtactacaggtagtctgcatgaaactattgcggaaagaattccaaaaacaggtacgacatacatgaatcagaatctgctggtgacaaagcgcgacggtagcacagagcgcatcaatctcgacaaaatccatcgcgttctggattgggcggcagaaggactgcataacgtttcgatttcccaggtcgagctgcgctcccacattcagttttatgacggtatcaagacctctgacatccacgaaaccattatcaaggctgccgcagacctgatctcccgtgatgcgccggattatcagtatctcgccgcgcgcctggcgatcttccacctgcgtaaaaaagcctacggccagtttgagccgcctgcgctgtacgaccacgtggtgaaaatggtcgagatgggcaaatacgataatcatctgctggaagactacacggaagaagagttcaagcagatggacacctttatcgatcacgaccgtgatatgaccttctcttatgctgccgttaagcagctggaaggcaaatatctggtacagaaccgcgtgaccggcgaaatctatgagagcgcccagttcctttatattctagttgccgcgtgcttgttctcgaactacccgcgtgaaacgcgcctgcaatatgtgaagcgtttttacgacgcggtttccacatttaaaatttcgctgccgacgccaatcatgtccggcgtgcgtaccccgactcgtcagttcagctcctgcgtactgatcgagtgcggtgacagcctggattccatcaacgccacctccagcgcgattgttaaatacgtttcccagcgtgccgggatcggcatcaacgccgggcgtattcgtgcgctgggtagcccgattcgcggtggtgaagcgttccataccggctgcattccgttctacaaacatttccagacagcggtgaaatcctgctctcagggcggtgtgcgcggcggtgcggcaacgctgttctacccgatgtggcatctggaagtggaaagcctgctggtgttgaaaaacaaccgtggtgtggaaggcaaccgcgtgcgtcatatggactacggggtacaaatcaacaaactgatgtatacccgtctgctgaaaggtgaagatatcaccctgttcagcccgtccgacgtaccggggctgtacgacgcgttcttcgccgatcaggaagagtttgaacgtctgtataccaaatatgagaaagacgacagcatccgcaagcagcgtgtgaaagccgttgagctgttctcgctgatgatgcaggaacgtgcgtctaccggtcgtatctatattcagaacgttgaccactgcaatacccatagcccgtttgatccggccatcgcgccagtgcgtcagtctaacctgtgcctggagatagccctgccgaccaaaccgctgaacgacgtcaacgacgagaacggtgaaatcgcgctgtgtacgctgtctgctttcaacctgggcgcaattaataacctggatgaactggaagagctggcaattctggcggttcgtgcacttgacgcgctgctggattatcaggattacccgatcccggccgccaaacgtggagcgatgggtcgtcgtacgctgggtattggtgtgatcaacttcgcttactacctggcgaagcacggtaaacgctactccgacggcagcgccaacaacctgacgcataaaaccttcgaagccattcagtattacctgctgaaagcctctaatgagctggcgaaagagcaaggcgcgtgcccgtggtttaacgaaaccacttacgcgaaagggatcctgccgatcgatacctataagaaagatctggataccatcgctaatgagccgctgcattacgactgggaagctctgcgtgagtcaatcaaaacgcacggtctgcgtaactccacgctttctgctctgatgccgtccgagacttcttcgcagatctctaacgccactaacggtattgaaccgccgcgcggttacgtcagcatcaaagcgtcgaaagacggtattttgcgccaggtggtgccggactacgagcacctgcacgacgcctatgagctgctgtgggaaatgccgggtaacgatggttatctgcaactggtgggtatcatgcagaaatttatcgatcagtcgatctctgccaacaccaactacgatccgtcacgcttcccgtcaggaaaagtgccgatgcagcagttgctgaaagacctgctcaccgcctacaaattcggggtcaaaacactgtattatcagaacacccgtgacggcgctgaagacgcacaagacgatctggtgccgtcaatccaggacgatggctgcgaaagcggcgcatgtaagatctgatattgagatgccggatgcggcgtaaacgccttatccggcctacggctcggtttgtaggcctgataagacgcgccagcgtcgcatcaggctccgggtgccggatgcagcgtgaacgccttatccggcctacggctcggatttgtaggcctgataagacgcgccagcgtcgcatcaggcacaggatgcggcgtaaaatgccttatccggcattaaactcccaacaggacacactcatggcatataccaccttttcacagacgaaaaatgatcagctcaaagaaccgatgttctttggtcagccggtcaacgtggctcgctacgatcagcaaaaatatgacatcttcgaaaagctgatcgaaaagcagctctctttcttctggcgtccggaagaagttgacgtctcccgcgaccgtatagattaccaggcgctgccggagcacgaaaaacacatctttatcagcaacctgaaatatcagacgctgctggattccattcagggtcgtagcccgaacgtggcgctattgccgcttatttctattccggaactggaaacctgggtcgaaacctgggcgttctcagaaacgattcattcccgttcctatactcatatcattcgtaatatcgttaacgatccgtctgttgtgtttgacgatatcgtcaccaacgagcagatccagaaacgtgcggaagggatctccagctattacgatgagctgatcgaaatgaccagctactggcatctgctgggcgaaggtacccacaccgttaacggtaaaactgtgaccgttagcctgcgcgagctgaagaaaaaactgtatctctgcctgatgagcgttaacgcgctggaagcgattcgtttctacgtcagctttgcttgttccttcgcatttgcagaacgcgaattgatggaaggcaacgccaaaattattcgcctgattgcccgcgacgaagccctgcacctgaccggcacccagcatatgctgaatctgctgcgcagcggcgcggacgatcctgagatggcggaaattgccgaagagtgtaagcaggagtgctatgacctgtttgttcaggcagctcaacaggagaaagactgggcggattatctgttccgcgacggttcgatgattggtctgaataaagacattctctgccagtacgttgaatacatcaccaatatccgtatgcaggcagtcggtttggatctgccgttccagacgcgctccaacccgatcccgtggatcaacacttggctggtgtctgataacgtgcaggttgctccgcaggaagtggaagtcagttcttatctggtcgggcagattgactcggaagtggacaccgacgatttgagtaacttccagctctgatggcccgcgttaccctgcgcatcactggcacacaactgctgtgccaggatgaacacccttcccttctggcggcgctggaatcccacaatgtggcggttgagtaccagtgtcgcgaaggttactgcggctcctgtcgcacacgcctggttgcaggtcaagttgactggattgccgaaccgttagcctttattcagccgggggaaattttgccctgttgttgccgggcaaaaggcgatattgaaatcgagatgtgaattggttgtagtgccagatacaacgcttatgcgtcttatctggcctacaacgattacatggcgtagtaatacgctttcacctgctcccagtccgctttggggattggctccagatatttttccagctggcggaagtcatgattaatcgctttatcgcgacgcaagcggcgacgacttttctccaggtcaagaaaaccagcttctgcattaccttctgttttcacatagatatggcgaacataacaacagccatgctgacgattaatgctatgcattttcttaaacgccagcgccactgctttcaacatggcttgccgtacttcgtcagaataaggcgatactgcatgctgggcataccagtcagcaatgctgatgaaccccgccatatcttcagtcaccagcaacgctcgccattcaccctcaattttcaccgcttcaccaaaaacgatcttcggcacgatgacaccggcccgttccagttctttaattaccgcaacctcacggacaatcgttggtcggccgaacggataacgtacggaatgaaacagatgatgcgtcatgcgctttacatacagctttttgccgttgcgctcgacgcattgcaccccgctcataccattacggcgatagttaggctcttcaacccagtcgccctctgttgcccaccagtgattaaattcgtcgtactttgctgaaactgccataccctatcgcctgtcatttttattaacgacaatgactataggtggttacctgaggaaaatcttaatgaaacgtgtcgtattaatgaatttcttttgccactactagcttgacaccgcttttacccttcatttgcagcgcatagattccaccagccactaccactaatagtgcgcccagcagataaaatgtgaatttaatcaggcggatacagcgatgaattttattcgacagggattaggcatcgccttacaaccagagttaacgctgaaaagcattgcaggtgaattgtgttccgttcctctcgaaccaactttctatcgacagatttcgttgctggctaaagaaaagccggtagaaggcagtccactgtttttactacaaatgtgcatggaacaattagtggcgattggaaaaatttgatatgagacaggatggcgcatgaacgccatcctgcagtaacattactctttattaagaaattttactgccttatcagggaaatcagtaaacagcccatttacacccgctttgttatacagagcatcatataactgattcacatcaggagtgtattcaggcagtttatctgaccgcacggtataaggatgcactaccagtttattctgctgagcatcttgcaccatgccagtgagtttgatattacccggctgcgatgtctcctcaatcaacatatggtaatccggaccaataccatctgcatattccgccacctgtttcatggcacccggcttaaacatccagtcgtagttgtaattaacccagcttccatccggctgtttctgctgcgtttcattccagtcggtataggcaatcagctgtaccagattgagctccatgcccattttgggttccagctcattcttaatacgcttcagctcatcagcatcaaaacattgcaaataaactttatcgtctttaccggtgtaaccatatttcttcagcacttccagcgtttttgccgcaatatccttcccttcctgatgatggaaccacggcgctttgatttctggataaataccgatatttttcccggtagagtgatttaacccctgaacaaattcaatctcttcttcaaaggtgtgcacccggaagtcggacttacccattgggaaacgccccggataagtctgcacttttttaccgttttcaatatcgaaaccttcggtaaatttcaacgacttaatttcatccagcgtgaaatctatcgcgtagtaacgaccgtctttgcgcgcccgatccgggaaacgatcggcaacatcagtaacacgatcgaggtaatggtcatgcagaacaaccagattgtcgtctttggtcatcaccaaatcctgttccagataatccgctccctgcgcatacgccatcgcttttgctggcagcgtatgctccggcaaatatccactggcaccgcgatgggcgatgactattttttcgttgctgtccgccgccattgcactgcttcccatgactatagtgctcatcatgatcgccatgctaaggtttttcagcgtcaatttcatgccattagcctccgttgcgttcttgcagtaattgttcatggcgacgtttttcgccaatcatcacaacaatcaacaagataaccgccagaatgctgccgccaatcattaccataaagccgccatcccagccgaagaagtccacggtgtagccaacaatcgcgctcgccgccaccgaaccgcccaggtaaccaaacagcccggtaaagcccgctgccgtacctgccgcttttttcggtgccagttccagcgcatgcagaccgatcagcatcacaggaccgtagatcaggaagccgataacaatcatacaaatcatatcgacggttgggttacctgccgggttcatccagtaaacgatagtcgcgatggtcaccagtgtcataaagaaaacgccggttgccccacggttgccacggaagactttatccgacatccagccgcacagcagagtgcccggaatacctgcatattcataaaggaagtaggcccaggaggatttatctagcgcgaaatgcttaacctctttcagataagtcggtgaccagtcgaggatgccgtaacgcagcagataaacgaacacgttggcgatggcgatataccacagcagtttgttcggcagtacgtactgcatgaagatttgcttcgccgtcagctcctgttccgctttttcgttatagtcgtccggataatcatttttgtactcttcgatcggcggcaagccacaggattgcggggtatcgcgcatcatcgcaaaggcgaataatgccaccagaatggcgcagaaagcaggcatatagagcgccgcatgccagtcattgaaccaggccatccccagcaggaacagcagcggcggaataccaccaccgacgttgtgcgcacagttccacactgacacaatgccgccacgttctttctgcgaccaccagtgcaccatagtacgaccacacggcggccaccccatcccctggaaccaaccgcagaggaacaacagtacaaacatcaccgcaatgctcgacgtcgcccatggcacaaagcccataaacaacatcactgccgccgccagaatcaaacctgcgggcaggaaaacgcgcggattcgagcgatccgataccgaacccatgatgaatttcgaaaatccataagcaatcgagatccccgaaagggcaaaacctaaatcaccgcgtgagaatccctgctcaaccagataaggcatagcaagcgcaaagttcttacgaaccaaatagtaagccgcatagccaaagaatatccccaggaaaatttgccagcgcaatcgacgataagtcggatcgatctccgcggcaggtaagcgcgctttgtgtggcgctggtttaaaaatactcaacattgatagcctccgtggcccgtggtcttatttatgattaacagcctgattcagtgagagaacctgccgtttcttgagttgccgcgatgttaagaaaacattcataaattaaatgtgaattgccgcacacattattaaataagatttacaaaatgttcaaaatgacgcatgaaatcacgtttcactttcgaattatgagcgaatatgcgcgaaatcaaacaattcatgtttttactatggctaaatggtaaaaaacgaacttcagagggataacaatgaaaactcgcgactcgcaatcaagtgacgtgattatcattggcggcggcgcaacgggagccgggattgcccgcgactgtgccctgcgcgggctgcgcgtgattttggttgagcgccacgacatcgcaaccggtgccaccgggcgtaaccacggcctgctgcacagcggtgcgcgctatgcggtaaccgatgcggaatcggcccgcgaatgcattagtgaaaaccagatcctgaaacgcattgcacgtcactgcgttgaaccaaccaacggcctgtttatcaccctgccggaagatgacctctccttccaggccacttttattcgcgcctgcgaagaagcagggatcagcgcagaagctatagacccgcagcaagcgcgcattatcgaacctgccgttaacccggcactgattggcgcggtgaaagttccggatggcaccgttgatccatttcgtctgaccgcagcaaacatgctggatgccaaagaacacggtgccgttatccttaccgctcatgaagtcacggggctgattcgtgaaggcgcgacggtgtgcggtgttcgtgtacgtaaccatctcaccggcgaaactcaggcccttcatgcacctgtcgtggttaatgccgctgggatctgggggcaacacattgccgaatatgccgatctgcgcattcgcatgttcccggcgaaaggatcgctgctgatcatggatcaccgcattaaccagcatgtgatcaaccgctgccgtaaaccttccgacgccgatattctggtgcctggcgataccatttcgctgattggtaccacctctttacgtattgattacaacgagattgacgataatcgagtgacggcagaagaggttgatattctgctgcgtgaaggggaaaaactggcccccgtgatggcgaaaacgcgcattttgcgggcctattctggcgtgcgcccgctggttgccagcgatgacgacccgagcggacgtaacgtcagccgtggcatcgtgctgctcgaccatgctgaacgcgatggtctggacggatttatcaccatcaccggtggcaaactgatgacctatcggctgatggctgaatgggctaccgacgcggtatgccgcaaactgggcaacacgcgcccctgtacgactgccgatctggcactgcctggttcacaagaacccgctgaagttaccttgcgtaaagtcatctccctgcctgccccgctgcgcggttctgcggtttatcgtcatggcgatcgcacgcctgcctggctgagcgaaggccgtctgcaccgtagcctggtatgtgagtgcgaagcggtaactgcgggtgaagtgcagtacgcggtagaaaatttaaacgttaatagcctgctggatttacgccgtcgtacccgtgtggggatgggcacctgccagggcgaactctgcgcctgccgcgctgccggactgctgcaacgttttaacgtcacgacgtccgcgcaatctatcgagcaactttccaccttccttaacgaacgctggaaaggcgtgcaacccatcgcctggggagatgcactgcgcgaaagcgaatttacccgctgggtttatcagggattgtgtggtctggagaaggagcagaaagatgcgctttgatactgtcattatgggcggcggcctcgccggattactctgtggcctgcaactgcaaaaacacggcctgcgctgtgccattgtcactcgtggtcaaagcgcactgcatttctcatccggatcgctggatttgctgagccatctgccagatggtcaaccggtgacagacattcacagtggactggaatctttgcgtcagcaggcaccagcccatccttactcccttctcgagccacaacgcgtgctcgatctcgcttgccaggcgcaggcattaatcgctgaaagcggtgcgcaattgcagggcagcgtagaacttgctcaccagcgggttacgccgctcggcactctgcgctctacctggctaagttcgccagaagtccccgtctggccgctgcccgcgaagaaaatatgtgtagtgggaattagcggcctgatggattttcaggcgcaccttgcggcagcttcgttgcgtgaactcggccttgccgttgaaaccgcagaaatagagctgccggaactggatgtgctgcgcaataacgccaccgaatttcgcgcggtgaatatcgcccgtttccttgataatgaagaaaactggccgctgttacttgatgcgcttattcctgtcgccaatacctgcgaaatgatcctgatgcccgcctgcttcggtctggccgatgacaaactgtggcgttggttgaatgaaaaactaccttgttcactgatgcttttgccaacgctgccgccttccgtgctgggcattcgtctgcaaaaccagttacagcgccagtttgtgcgccagggtggcgtgtggatgccgggcgatgaagtgaaaaaagtgacctgtaaaaatggcgtagtgaacgaaatctggacccgcaatcacgccgatattccgctacgtccacgtttcgcggttctcgccagcggcagtttctttagtggcggactggtagcggaacgtaacggcattcgagagccgattctcggccttgatgtgctacaaaccgccacgcggggtgaatggtataagggagatttttttgcgccgcaaccgtggcagcagttcggtgtaaccactgatgagacgctacgcccgtcacaggcagggcaaaccattgaaaacctgtttgccatcggttcggtgctgggcggatttgatcccatcgcccagggatgcggcggcggtgtttgtgccgtcagtgctttacatgccgctcaacagattgcccaacgcgcaggaggccaacaatgaatgacaccagcttcgaaaactgcattaagtgcaccgtctgcaccaccgcctgcccggtgagccgggtgaatcccggttatccagggccaaaacaagccgggccggatggcgagcgtctgcgtttgaaagatggcgcactgtatgacgaggcgctgaaatattgcatcaactgcaaacgttgtgaagtcgcctgcccgtccgatgtgaagattggcgatattatccagcgcgcgcgggcgaaatatgacaccacgcgcccgtcgctgcgtaattttgtgttgagtcataccgacctgatgggtagcgtttccacgccgttcgcaccaatcgtcaacaccgctacctcgctgaaaccggtgcggcagctgcttgatgcggcgttaaaaatcgatcatcgccgcacgctaccgaaatactccttcggcacgttccgtcgctggtatcgcagcgtggcggctcagcaagcacaatataaagaccaggtcgctttctttcacggctgcttcgttaactacaaccatccgcagttaggtaaagatttaattaaagtgctcaacgcaatgggtaccggtgtacaactgctcagcaaagaaaaatgctgcggcgtaccgctaatcgccaacggctttaccgataaagcacgcaaacaggcaattacgaatgtagagtcgatccgcgaagctgtgggagtaaaaggcattccggtgattgccacctcctcaacctgtacatttgccctgcgcgacgaatacccggaagtgctgaatgtcgacaacaaaggcttgcgcgatcatatcgaactggcaacccgctggctgtggcgcaagctggacgaaggcaaaacgttaccgctgaaaccgctgccgctgaaagtggtttatcacactccgtgccatatggaaaaaatgggctggacgctctacaccctggagctgttgcgtaacatcccggggcttgagttaacggtgctggattcccagtgctgcggtattgcgggtacttacggtttcaaaaaagagaactaccccacctcacaagccatcggcgcaccactgttccgccagatagaagaaagcggcgcagatctggtggtcaccgactgcgaaacctgtaaatggcagattgagatgtccacaagtcttcgctgcgaacatccgattacgctactggcccaggcgctggcttaaactcctttctgatgcccggtaagcatgtggttaccgggcatttttgcgtacacgattccgtgcccaatgtatgcgttgcaacgcagtgaaaattcctctgaaaacgtctcgcaaaggctgaaactggcagatgtcaaaggcctgggataaccgtaatgtcgcgtcatcataaatatcaggtgacggacaaccatgaccgaatcaacaacctcctccccgcatgatgcggtatttaaaacctttatgttcacacccgaaaccgcacgggattttctcgaaatacatttaccagaaccactgcgcaagctttgcaacctgcaaaccttacgcctggaacccactagttttattgaaaaaagtttacgcgcttactactcggatgttttgtggtccgtggaaaccagcgacggtgacggctatatctactgcgtgattgaacatcaaagctctgcagaaaagaatatggcttttcggctaatgcgctatgccactgccgccatgcagcgtcaccaggacaaaggctatgacagagtcccgctggtggtgccgttgctgttttatcatggcgaaacctcgccttacccgtactcactcaactggctggatgagtttgacgatccgcaacttgcccggcagttgtacaccgaagcttttctgttggtggatatcaccatcgtacctgacgatgagatcatgcaacatcggcgtatagctctgctggaactgattcaaaagcatattcgcgaccgcgatttaatcggcatggtcgacaggatcaccacgcttttggttagaggcttcactaatgacagccagctacaaacactgtttaattatctgctgcaatgcggcgatacctcccgtttcacccgttttattgaggagattgccgaacgttcaccactacaaaaggagagattaatgactattgctgaacggctacggcaggaagggcatcaaattggctggcaggaaggtatgcatgaacaagccattaaaattgctttgcgcatgctggagcagggctttgaacgtgagattgtgctggcgacaacccaactcactgatgctgatattccgaactgtcattaaaaggagagattaatgactattgctgaacggctgcggcaggaaggacatcaaattggctggcaggaaggtaaattagaaggtttgcatgaacaagccattaaaattgctttgcgcatgctggaacagggctttgatcgtgaccaggtgctcgcggccacccagctaagcgaagccgatctggcagcgaataaccactaattaacacaggcccacagccgatccccatgggcctttgatatcaataactaccttttatgcgtggcccatttttgcctgatttaaacatcgccagtcgttgatccagggcatcgctgtagagcatcgtgtcaacgccaacagcgacaaagttcgctccccacgccaggcattgctgcgccatatcaggagccacagccagaaaaccagccgctttacccgcagcacggatccgccgaatactggtttcaataattcgctgcacttccgggtgcccggcgttatccgggtagcccaacgacgcagaaagatccgcaggtccaataaacacgccatcaatcccttcgacgtcgaggatttcgtccaggttatccagtgccgttttactttccacctgcaccaacagacaaagcgaatcgttaacttgcgccatgtaattctcaatgcgtccccagcgcgcagcccgtgccacactggccccgacaccacgctcaccgtagggaggatagcgcgtggcagacaccacctgacgtgcctgttcggcagtatcgaccatcgggatcagtagagtttgcgcgccaatatccaggacttgtttaatcagcggtttactgccttccaccggacggatcacgggttggctggcatagggcgctaccgcctgtagctgatgataaagatcctgaatggtgtttggcgcgtgctccccgtcaatcagcaaccagtcataaccagaagtggcggcaatttctgccatataggcagtcgttgagcttaaccacagaccaatttgcacttcgcccttgcgtaaacgttctttaaagggattgcttaataatgcgttcatcgtgttccttaacctatttaatgatgtgccacgtcggtctgcgcaacagtgcgatttacacgcagagtgaaaataatcagcgaaccgatgaccgccaccgctgccagcgtcagtaatcccgccgcatcgctggcaaataacgtttctgctttcacgcgcaggatcggggcaataaacccgcccactgcaccaaacaggtttacaaaaccaattcccgcagccagcgccgtaccggaaagcagttgtgtcggcatcgtccagaacactggctgcacggcaataaacccgatagctgcaacacacagcgctacgatcgccattactggagaaagcagcccggacagaccaataccaatgcccgccgccagtaatgtcagcgctgcgacattacgccgttcgccggttttatcggaatagcgcggaataagccaggtcccaaacaaggccgcaacccacggaatggcggtgaccaccgacgctgtaaagcccacttttgttcccagcaatgccgcaacctgggtcggcaggaagaaaattaatccgtaaaccgccacctgaatggtcaggtagataatcgctagttgccagactcggccattacgcagcgcatcgctcagccgagaagtcactttctgttgttcttcacttgccagttgattgataagcaacgttttttcttgtttactcagaaaacgtgcctgctccggtgtgtcatcaagccaaaagaatgtgaataccccagcaccgactgccaacaatccttcaatcacaaacatccagaaccagccgggatgccccataaatccatgcatctccaacagcgcgccggaaagcggtgatcccagtgttaacgccagcggtgcgcccatatagaacagccccataatgctggcgcgattacgctgcggaaaccattgcgaggtgagataaatcataccagggaaaaatccggcctccgcagcacgaagcagagtgcgaactatcagaaatttcgcttcagtatcggcccatgccatggctgccgaaagaaatccccacagcagtgttgtcgtaccaatccaggttctggcccccagtttgcgcatcaaaagattcgccggaacacccagaaacgcatataccacaaagaaaatgcctgctcccagcgcataagcttcattactcaacccggtatcaatctggtaggtctgtttggcaaaaccgatattcgaacggtcgagaaacgccagcacatacagcgccaacataaacggaattaaacgcacacggtttttcttcaccacggcgtcaagcaaagcggtgctcataaaaagctccttagaatatgtgggcgttaccgttgtcacagcaacgcccggagtgattagtggctgtaggggcgtttcaaattgcagtcacgattgagttcgacgccaaaaccgggtttatcaagcactgatttatgaatacgaccattcaccggaaccggctcattgagcagaatcgggtcaaactgcggacgcatcgttgaacaatccgggctggtcatcaggaattcgctgaatggcgtattggtgaaggtgatcaccgcatggtgagagtaaacagacgaaccgtgcggcaccaccagttgccccctggatttggcgattgcggcaatttccaccagcgtggttaaaccaccgcaccagccaacatccggctgcataatgtcgataccggtttctgaaagcgtacgaaaagattgcagtgtgccgtggtgctcaccgctggtgaccatcattccgactggcgcgttgcgtttcagttcgcgataactttcatactgctgtggcggcaggcactcttcgatccatttcaggttatagggcgcgcaagcgtgggccagtttggtcgcatagttcacgtcctgactcatccagcagtcgagcattaaccagaaatcctcaccgcatttttcacgcatatccgcgaccatagcggcatctttgcggatccccgcatcgccatcatgtggcccccagtgcgtcggcattttgccaccgataaagcccatctcttttgccagatccggacgcgcacctgtggcgtagaactgaatctcatcacgaacagcgccgcctaaaagtttataaaccggaagcccgaccactttgccgaacagatcccacagagccagatcgacacaagaaatcgtattcatcaccaggccaccagagccggagtaatacagggtggcactgagcatttgatcgtggatcagtttgatatcactgacacatttaccctcaatgaaacggttaagatgtttttcgacaataaaacagcccatttcaccggctgtcgaaacggcgaatccggtctggccgttttctgcttcgacttcaacaaccaacgtgccaagaacgttaatgccaaatgactggcgtgactgctcgtaatcgcggtatttactcatcggggtggcaatatgatcgtctatccagtgattcgccccctggtcgtgataatcaccgccgccagcgcctttttctgctgtcgcaccgccagtaaaccaggcgcgaacctgtttaatttttggtagggtcatgatgttctccattgttatgaggcttgtaagtcaaagggacttttccatcccaacagacgtgaaatatccctggcgcaggcaatggccttgcccgccagataatcacggtattcttcattgatttgtaagcgggtaccgaccaccgagatcgcagcggtaagctcgttattggcgttaaacaccggcgcagcgacacaacggacatcggcgtaatcttcgccgttgtcatagctccagccctgacggcgaatacgcgccagttcttcgtgaagttgctgtggatgagtaatcgttgtgggtgtcgcctgctcccagaccagcccttcgataatactttgctgtaccgctgcaggttgccaggcaagcaggcatttacctattccggagcgataaagcgaaaggctttttccttcatgggaacgcacgctgatagtggctgatgactccactttcaaaatgtaataagcgctgccgttatcaataatccccaggtgacataacagcccggtggtatccatcagttgcgtcaaacgcggtcgagccagttcccggagatccatcttgcttaacgcatgaccggaaagctccaccagcctggtccacaaacaaaaattttcctggtgatcaaggctaagaaaacgctgacgcctgagttcattaagcagcaaataggccgtgcttttagggattcccaatgtgtcaatgatcgtcgcagcactacaggggccaatgcgggcaatcaaattgagaatatcaatagcccgtgtcagggcgggaactttgcttgattccaacatactggactccagtcttagatactggaatcagtctcgttgctcagggggagtaaaattgtgaagcgcatcaaatcccgctcctcgtccagcagactggagaaattacgcacaaatttgtgaatcagcgcacggattttttcttattgagtacaacaggttggacaaattttgccggagggggaatgtgccggtgcagtaaaccggcacagagtggcggaatcagacagataaggtcatggactcaacaacctcaatccagccatgctcactggcgatatcctggccgtttaaccaacggcgcagcatattcagtgccatcattgcgcacacttcctgacggatagccaggctgtagcgcgtagtgctgaaacgcacacgcagagcgaaagtgccgtctggcgtggctagcgcaaagttgagatgctcgttctcgaaacccgaaacagccagtgccagcccggcaaaatggttggcccgccgttctgtaatccagtgcgcagtttgcgccagggtttcctcctgtgaaggaaccacttcacacgccagcaatggagcacctgcgcgagaaagttgcaaagccaataaaccaccggtgaattgctcgctcaacgtcaggctgaactggcggttttgcaattcgcgactgatctgcgcgggcagtccttcagtgccttcgaaaatcacgctctgtccggcaacacgtttaacatccagccacagtttttccatcgcctgttgctcgcttgccggtccggtgagtttcagttcgatgataggcattgaggagcgatagcccattgttacgcccggcggcagttgtagagtgtccaggctttgtgccagatcgctttccgaacgaccaaaagtagtcaaacgcagacaaaccggcggctgcggtaaagaaaaacgctcgcgcaggcgcggcaggatttcgtgctcgaccatcaccttaaattctgacggtacgccgggagtaaagaacatcaggcaacgattaagctgcacggcaaaaccacaggcggtgcctaccgggttattgataaattcagcactggcaggcagctccgcttgtttacggttgctcggtgccattactcgtccacgttcgtggaaatagcgttccatctctttgagccaggcttcatgcagcaccaggccttcaccttttgctgtcgcagcggcgagtgcgcttaaatcatcgctggtcggtcccagcccgccgttaacgatcagcacatcggcgtgctgactacgttcgcgaagaatggtgactaagtcatcaaggttatcccccaccgtattgcggcgagataatggcaacccctgatgaaagaaaaaatcggccagccaggcagcgttagtgtcaacgatttgcccgtgtaacacttcatccccggtggataacatttccacttttaacatggttatctcctgcttttgttatcgaatcactataacgcaaagggagataaggcgtagtaagaaactgaatggcgcgacagaatgccgcgccggaagggatcagaaactggcgttaaccccaacatacgggccgtcagccacggcgttgtcgcggttaccgtctttacccgacagattcaggtagcgataacccgcctcaatactgactggacgcataatggtgtaacgcgcgccagcattcgcttcttcataactttgaataccgctggagagcgaatccggagagtagtaatactcgccaaacaaacggaagctgttgccaattttccactgcaaaccacctcctaccgctgcggcataaccttcatcgccgtaattcgggttggtgtaaacgccttttccgccaacggtcgccattaacggcccgagaggcagattcaaccccagccccacgccagcgacatcaccgtcgtcgtcgttatgtgtccagttaccgcttaacgccaggcccgtcgtttcagtcccaaaaccgacaccaatattggtgtattctttacccgcctgaccgctgatgctcattgcattgaccgatgcagaaaccaacagcattccggccagacctgctagcgcaatttttttcattatcccctttcccacaagcaattaatcaaaattcccaaagctgcgggattgtactgcctggcacagaggattcaatgagcgaaaaaaaggatctagtcacttattgtaactaaatacttcttaaataattaaatgccgaaaaaataaacacactttatcgatacacacaaaaataataataagtacagttatcatcgcaaaagagattactgtcactttcacatatttgtgagttaccgtattctcatggtttctttttatttataaggaatatccctgtgcgacaacggactattgtatgccctttgattcaaaatgatggtgcttatttgctgtgtaaaatggccgacgatcgcggcgttttccccggtcaatgggcgatttcgggtggcggcgtggagcctggcgaacgaattgaagaggcactacgccgcgaaattcgcgaagaactgggagaacagctgcttttgacagaaatcacgccgtggaccttcagcgatgatattcgcaccaagacgtatgcagatggtcgcaaggaagagatttatatgatttacctgatttttgactgcgtttctgccaaccgagaagtgaaaataaacgaagagtttcaggactacgcgtgggtaaaacctgaagatctggtgcattatgatttgaatgtcgccacccgaaaaacgttacgtttgaaaggtcttctgtaacaatgatgacagccattactggctgtcagattgaaaatttagtggttaacgaattccccatccagataaactttgcctttttccacatgcatgactaaaccatccagataatcaggtttaaatgtcgcgtcacgcttatctttagcaatatatgtcaggcaatgattatgggtgaaaataacgatatttttatcaggcgctttgctttgtaagtccttaattgcactataaatctcattaccgcactgaagaagtcgtttatctaccgtcaattttttacccgctgaaaaccaggtagccgactgaatggtccggacggtattactggaataaagatcgaaatcagggatatcagcactaaaagcgttgcccagttcacgggcatcctgggtacctttaaccgtaatacctgttttatctgacaagcattgattggttgaacggtcgcaacgttcagcatgacgaaacaaaacgacaaccgggtgctgctgtgccagtctggccagtgttttattgtcgatacgtggcaaaccattgctactccaggcggcatgagtacccagtccggcaattgcagcgagcgccagtaaaatgatgatatatttttttgacttcaacgaagagcggcaaaaagctaacacgtaaactccacctatagacaagcgcaaccagacaattaccgtgaaattgagctacatttctggcgataattcgcagttggtgtaatattaaaaatcctacgatgtcggcaaaatgcctcaaaattttgccaaatgcaaagcctaaataagaaaaaatataaaaatttcaatatttacgtctaatattagtttcttaaggttaagttaatattctatccttaaaatttcgctccaaatggcaaaatatacacaacactctttatagcaaatataagtggacaggtattcaatggcggaaggaaaagcaatgtcagaatttttgcctttttcgcgaccagcaatgggcgtggaggaactcgctgcagttaaagaggttctcgaatccggttggatcacaaccggtccgaagaatcaggcgcttgagcaagctttttgccagttgacgggaaatcagcatgccatcgcggtcagttcagccaccgccggaatgcatatcacgctaatggcgttgaaaattggcaagggcgatgaagtgattacgccttccctgacctgggtttcaaccctcaatatgatttccttgttgggtgcaacgccggtaatggtggatgtcgaccgcgatacgctgatggtcacgcctgaagctatcgagtcagccattacgccacgcactaaagccatcattccggtgcattatgccggtgcgccagcagatattgacgccattcgcgccattggcgaacgttacggcatcgcagttatcgaagatgctgcccatgccgtcggtacgtattacaaagggcgacatattggcgcaaaaggtaccgctattttttcatttcatgccattaaaaatattacctgtgctgaaggtggcctgattgtaactgataatgaaaaccttgcccgccagctacggatgctgaaatttcacggtctgggtgtcgatgcctatgacagacaaacctggggccgtgcaccgcaggctgaagtcttaacaccgggctataagtacaatctgaccgatattaacgccgcgattgccctgacacagttagtcaaattagagcacctcaacacccgtcggcgcgaaattgcccagcaatatcagcaagcactggcagctctcccctttcagccattaagccttcccgcctggccgcacgttcacgcctggcatctgtttattattcgtgtcgatgaacaacgttgtggtatcagtcgcgatgcgttgatggaagcgttaaaagaaagaggcattggtaccgggttacatttccgcgccgctcacacacaaaaatattatcgcgagcgttttcccacgctgtcgttaccgaataccgaatggaatagcgaacgcatctgttctttgccgctgttcccggatatgactaccgccgatgccgaccatgtcatcacagcccttcagcaactcgcaggacaataagccatgtttgaaatccaccctgttaagaaagtctcggtggttattcccgtttataacgagcaggaaagcttaccggaattaatcaggcgcaccaccacagcctgtgaatcgttggggaaagagtatgagatcctgctgattgatgacggcagtagcgataattccgcgcatatgctggtcgaagcctcacaagcggagaacagccatattgtgtctattttgcttaaccgcaattacgggcaacattcagcgattatggcgggattcagtcacgttactggcgacttaattattacccttgatgccgatctccagaatccgccagaagaaatcccccgcctggtggcaaaagccgatgaaggttacgacgtggtagggactgtacgccagaaccgccaggacagctggtttcgtaaaaccgcttcgaagatgattaaccggcttattcagcgcaccactggcaaagcgatgggtgattacggttgtatgctgcgcgcctatcgccgtcatattgtcgatgcgatgttgcactgccatgaacgcagcacctttatcccgattctggcgaatatcttcgcccgccgtgccattgaaattccagtacatcatgccgagcgtgagtttggtgaatccaaatacagttttatgcgcctgattaatttgatgtacgacctggtgacctgccttaccacaacgccgctacgtatgctgagtctgctcggcagcattattgcgattggaggttttagcattgcggtgctgctggtgattttacgcctgaccttcggaccacaatgggcggcagaaggcgtctttatgctatttgccgtgctgtttacttttattggcgctcagtttatcggcatgggattactcggtgaatatatcggcaggatctacaccgatgtccgcgcccgcccccgctattttgttcagcaagttatccgtccatccagcaaggaaaatgaataatgaaaaccgtcgtttttgcctaccacgatatgggatgcctcggtattgaagccctgctggctgccggttacgaaattagcgccatttttacccatactgataatcccggtgaaaaagccttttatggttcggtggctcgtctggcggcggaaagaggcattccggtttatgcgccggataacgttaatcatccgctgtgggtggaacgcattgcccaactgtcgccagatgtgattttctctttttattatcgccatcttatttacgacgaaattttgcagctcgctcccgcaggtgcatttaatctgcatggttcgctgttaccaaaatatcgtggtcgcgcgccgctgaactgggtgctggtcaacggtgaaacggaaactggcgttacattgcaccgaatggtgaaacgtgccgatgccggggccattgtggcgcaactgcgcattgccattgcgccagacgatatcgctattacgctgcatcataaattgtgccatgccgcgcgccagctactggaacagacattacccgccattaaacacggtaatattctggaaatcgcccagcgcgaaaacgaagccacctgttttggtcgcagaacgccggatgacagtttccttgaatggcataaaccggcatccgtactgcacaacatggtacgtgccgttgccgatccgtggccgggtgccttcagctatgttggcaatcagaaattcaccgtctggtcgtcgcgtgttcatcctcatgccagcaaagcacagccggggagcgtgatttctgttgcgccactgctgattgcctgtggcgatggcgcgctggaaatcgtcaccggacaggcgggcgacggcattactatgcagggctcgcaattagcgcagacgctgggcctggtgcaaggttcacgcttgaatagccagcctgcctgcaccgcccgacgccgtacccgggtactcatcctcggggtgaatggctttattggcaaccatctgacagaacgcctgctgcgcgaagatcattatgaagtttacggtctggatattggcagcgatgcgataagccgttttctgaatcatccgcattttcactttgttgaaggcgatatcagtattcattccgaatggattgagtatcatgtcaaaaaatgtgatgtcgtcttgccgctggtggcgatagccacgccgattgaatatacccgcaacccgctgcgcgtatttgaactcgattttgaagagaatctgcgcattatccgctactgcgtgaagtaccgtaagcgaatcatcttcccgtcaacttcagaagtttatgggatgtgtagcgataaatacttcgatgaggaccattctaatttaatcgtcggcccggtgaataaaccacgctggatttattcggtatcaaaacaattacttgatcgggtgatctgggcctatggcgaaaaagagggtttacagttcaccctcttccgcccgtttaactggatgggaccacgactggataaccttaatgcagcgcgaattggcagctcccgcgctattacgcaactcattctcaatctggtagaaggttcaccgattaagctgattgatggcggaaaacaaaaacgctgctttactgatattcgcgatggtatcgaggcgttataccgcattatcgaaaatgcgggaaatcgctgcgacggtgaaattatcaacattggcaatcctgagaacgaagcgagcattgaggaactgggcgagatgctgctggcgagcttcgaaaaacatccgctgcgccatcatttcccaccgtttgcgggctttcgcgttgtcgaaagtagcagctactacggcaaaggatatcaggacgtagagcatcgtaaaccgagcatccgcaatgcccaccgctgcctggactgggagccgaaaattgatatgcaggaaaccatcgacgaaacgctggatttcttcctgcgcaccgttgatcttacggataaaccatcatgaccaaagtaggcttacgcattgatgtcgatacctttcgtggcacccgtgaaggcgtgccgcgtctgctggaaatcttgagtaagcataatattcaggccagcatttttttcagcgtcggcccggacaatatgggccgccatctctggcgactggtgaagccacagtttttgtggaagatgctgcgctcaaacgcggcatcgctttatggctgggatattttactggcaggtacggcctggccaggtaaagagattggtcatgccaatgccgatatcattcgtgaagcggctaaacatcacgaagtcggcctgcacgcctgggatcaccatgcctggcaagcccgtagcggtaactgggatcggcaaacaatgatcgacgatattgcacgcggtcttcgcactctggaagagattatcggtcaaccggtaacctgttctgccgctgcgggctggcgtgccgaccagaaggtgatcgaagcaaaagaagcgttccatttgcgctacaacagcgattgtcgtggggccatgccgttccgtccattgctcgaatcaggaaaccctggcactgcgcaaattccggtgaccttacccacctgggatgaagtgattggtcgggatgtgaaagcagaagattttaacggttggttactcaaccgcatcctgcgagataaaggcacgccggtttataccattcatgcagaagttgaaggctgcgcttatcagcataattttgtggatctcctcaaacgcgcagctcaggaaggcgtgacattttgccctttaagcgaactgttatcagagacgttgccgctcggacaagttgttcgcggaaatattgccggacgtgaaggctggctgggttgccaacaaattgcgggtagtcgctgatgaaatcggtacgttaccttatcggcctcttcgcgtttattgcctgctattacctgttaccgatcagcacgcgtctgctctggcaacccgatgaaacgcgttatgcggaaatcagtcgagaaatgctggcatccggcgactggattgtgccccatctgttagggctacgttatttcgaaaaacccattgccggatactggattaacagcattgggcaatggctatttggcgcgaataactttggtgtgcgggcaggcgttatctttgcgaccctgttaactgccgcgctggtgacctggtttactctgcgcttatggcgcgataaacgtctggctctactcgccacagtaatttatctctcattgtttattgtctatgccatcggcacttatgccgtgctcgatccgtttattgcattctggctggtggcgggaatgtgcagcttctggctggcaatgcaggcacagacgtggaaaggcaaaagcgcaggatttttactgctgggaatcacctgcggcatgggggtgatgaccaaaggttttctcgcccttgccgtgccggtattaagcgtgctgccatgggtagcgacgcaaaaacgctggaaagatctctttatttacggctggctggcggttatcagttgcgtactgacggttctcccttggggactggcgatagcgcagcgggagcctaacttctggcactattttttctgggttgagcatattcaacgctttgcactggatgatgcccaacatagagctccgttctggtactacgtgccggtcatcattgccggtagcctgccgtggctgggattactccccggtgcactgtacacaggctggaaaaaccgcaagcattccgcaaccgtctatttgttgagctggacgataatgccgctgctgtttttctccgtcgctaaaggtaaattgcccacctatattctttcctgctttgcatctctggcaatgctgatggcgcattacgctttgctggcagcaaaaaataatcctctggcgctgcggattaatggctggattaacatcgcttttggcgtcactggcattattgccacatttgtggtctccccgtggggaccaatgaacacgccggtgtggcaaaccttcgagagctataaagtcttttgtgcctggtcgattttttcgctatgggcatttttcggctggtacaccttaacaaacgtcgaaaagacctggccttttgccgcgctttgcccgctggggctggcgttgctggtaggattttcaattcctgacagagttatggaaggaaaacatccgcaattttttgtcgagatgacacaagaatcacttcagccaagccgctatattcttactgatagcgtcggtgttgccgcaggtctggcatggagcctgcaacgcgatgacatcatcatgtatcgccagacaggtgagttgaaatacggccttaattatccggatgcgaaagggagatttgtcagcggtgatgagttcgcaaactggcttaatcaacatcgtcaggaggggattattactctcgtgctttcggttgaccgcgatgaagatatcaacagtctcgccattccgcccgcagatgccatcgatcgtcaggagcgtctggtgctgattcagtatcgtcccaaatgatctggctaacattagtctttgccagcttgcttagcgttgccgggcagttgtgtcagaaacaggcaacctgctttgtggcgataaacaaacggcgcaaacatatcgtgctgtggctgggactggcgctggcttgtcttggtcttgccatggtgctctggctgctggtcttgcagaacgtaccggtaggcattgcttacccgatgttaagtctgaattttgtctgggtgacgctggctgcagtaaaactgtggcacgaaccggtatcgccgcgtcactggtgtggggtggcgttcattattggcggcattgtgatcctcgggagtacggtgtaatgggcctgatgtggggattattcagcgtcattattgcctcagttgcgcaattaagcctgggttttgcggcgagtcatctgccgccgatgacgcacttatgggattttatcgcggctctgttagcttttggcctggatgcccggatactgttactcgggctgctgggttatctgctttccgttttttgttggtataaaacgcttcataaacttgcgctaagcaaagcctatgccttgctcagtatgagttatgtgctggtatggattgcttcaatggtacttcccggctgggaagggactttttcgctgaaagcactactgggagtagcctgtattatgagcgggttgatgctgattttcctgcccacgacaaaacaacgttactgagttttccctgccactttacactgccgttcccactcatcggggctataactgcttgccgagaggactttcaccgtatgcagcttttcacgattaatacaataaagcgcattctgcaaaggcgagagtaaatcccccactttcacggcgaagtcactcttcacttcggcgatcatttttatcgcgccgccagcatcgcagagcataagtacatgtctgttatcttgtttattgcagcacgattttttgaccagccattccattgcattatcctgtttgctaagagttttcacatcaatttacagattaacagataaactctttatcaacggcaatggaatggcagaaatgagaagtgaaacggagggttaattattgctgacgttgcacccactcttttagcgcctgacgtgaaattttaataccgccgtttttcagctccggcggcagagttagccagcgcaccggttgttgaaaacgggccagcttatctttcacccattcactaagatcaacgctctcgtggtcatactccatcaccgccaccggtcgatgaccaaactccttgtcggcaacggggacgataaacacctgcaaaaccgcaggatgtgcagcaattacgcgctcgacttcttccggctgaataccctctccgccactgaagaatagattgtctaaacgtccgacaatggtcagcttgccattatgcatctcaccgcgatcgcgcgtagcgtaccagccttcgtcattaaccagtgaaaccagttgcccgttacgccagtaaccttctgccatactggcagcccgcagccacacttcattattaacgattttcacttcccgacccggcagcggcgaaccaacgtctgccaggccgtcggcttctttcgcacacaccgtggaggcaaactcggtcagaccatagccgcaaaagcaacgaatcccctgctcgcgcgcctgttccgtcaactcgaccgggatagccgcgccgccaagtaacaccgctttcagggaaacggaactacggttaaccagcaaacgccagagttgtgttggcaccagtgaagcgtgagtacagcctgccagcatttgctccaatggctgtttatcacgtaccgtcatccgcgcaccagcgtataaccagcgccacataattccctgaccggagacgtgaaacagcggtaaagagagcaaccaatcatcgtgatcgccaaacggaatcagcgataacacaccttgcgcactggcaagatgggcctgataagtatggacagcggctttcggcaaaccggtagaacccgaggtcaacgtcattgagcacagacgcgtcggctgccacgtagcggcatgtgcgccttcaaccagctgaatgtgcagcgacgttaatgccggaaacgtgttttccccatccggcaccagagcaaattgcagcgtcagattgggcagcaattcttcaagcaacggttgcggcagctgagggttcacgggcaacacccgcgccccgcattgcagtaacgccagccaggcgagcagcgtttgcggcgtattccacgcccgcaacatcacgccgctgccctcaaccaccccctgcaccgcaaatccggaggctaattcatcgacgcgagcacaaagctcgcgccagttgagttgctcgtcattaagacgtaaggcgatggtttctccccgcacttgccgccagtgacgccacggccagtcagagaagatcataacaaccgctccagtgcatcaacttccacgacaggcagcgtgctacccggccagcgacgtacctgctgcgcctgcatcagatccagcgtgtccagccctggaatggtgtccggcgttaaccaggcggcaatccgcgccagttgcgttaagcctaagctcgattcaatggaagaactgatcaccgccgtcagccccagcgcgtgcgccgcctgtacctgctcgcgtactttttccagactgcccgtgagcgtgggtttgataactaccgcgcgcacgccctcttcagccacaaaggcaaaatccggctcgcgcaggctttcatcccaggcaatggcaatgccggtttcacgggcaaacgctcgcgaatcatcgcgggttttgcacggctcttcgagaaacgcgatgcggtcgcgataatccgggttaacgtatttggcaaactgctgacctttcagcggtgtccaggcgcgatttgcgtcaagacgcaaatgcagatccggaattgcctccagcaacagattcaccaccatgccgtcgcgcaccgcttcgtacaatcccactttgaccttcgccactttctcgcctggcatatctgcaagtttgaggatcagatcgtccggatcgccattacacagcggtgccgcacggtagttggctgcttgcggcaacgtatctgtcagttctgccaatgcacagcttacgccaaaggccacggaaggcatctgcggtagctcgcaatcgcctgccagccagttatttacccaggcaagcagcacactttgcgcctcttcccaggtttcctgactgaagcccggcagtggggagatctccccccacccttcgcgctcgccttcacgcaggcaaacatacagcccgtcgcgggtttttaaccgcctgtcgcgcagaaccacccccgcgtccatggggatctgccagcggtatacctgcgcgctacgcattacggattccgtttgaatttgctgaagtcaggctgacgtttctggttgaaggcgttgcgaccttcctgaccttcttccgtcatgtagaacagcatggtggcgttgcccgccagctcctgcagccccgcctgcccgtcacagtcggcgttcagtgcagctttcaggcagcgcagcgccatcgggctgttttgcagcatttcgcggcaccaacggacggtttctttttccagatccgccagcggtaccacggtgttcacaaggcccatatccagcgcctgttttgcgtcgtactgacggcacaggaaccagatttcacgcgcttttttctgcccgacgatgcgagccatgtaggaagcgccccagccgccgtcgaaggaaccgactttcgggccagtctgaccgaagatggcattatctgccgcgatagtcaggtcgcacatcatgtgcagaacgtgaccgccgccgatggagtagccagccaccatcgcgacaaccggtttcggacaggtacggatctgacgctggaagtccagcacattcaggtgatgtacgccggaatcatctttatagccgccgtaatcaccacgcactttctggtcaccaccggagcagaacgctttatcgcctgcaccagtcagaatgatcacgccgatgttgtcgtcataacgcgcatctgccagcgcctggatcatctcttttaccgtcagaggacggaaggcattgcgcacctgcggacgattaatggtgatttttgcgataccgtcggtggatttttcataacgaatgtcctcgaaaccttcggagcagtcgtgccattcaaccggtgcgtaaagcattgcttcatcaggataaatcatattgtgtcctttagtcagaaacgcaagatctgcgccagacttgcgattacgccagcgggattttcccgatgcgcgttatgtccggcgcgaggaatgacatggcagtcggcagccagttccgccgccagggcgcggaatttgctgtcacgttcaccacataaataataaaacgcaaatgtgcgggcgctaaggttagcacgtaaatcaggctggacggcgagagaagtcgcctccagcatggcggcaagcgttgcgccattattgttgctgcgcagcgccaccagctcccggcgttgatcgtcattgagtgaggcaaaaacaggctgttgataccagtcggcaaataccgccgttaacggttctgtgagaaaacgctgcacccattggcgatcggaacgctgacgttccgcacgttgttcagcattttgcagccccggatgcccgccttcgacaataaccccacaaagccccgccagcccctggcaagccgccatcatcgccacccgtccaccaagcgagtaccccaccagccagaagtcaaggatgttgtaactaaccaaggttttacgcagtaagtcggtgacatcatcaaatccatcgacgctaatcgccgccgaaccaccgtgacctgggagatcaacatacaaccgtgagtagtcggcaaacgcctcgcccacttcttgccattcgtggcaatcgccggaaaaaccgtgcaaaaacaccagccagggtaaacctggttttccgtgttttgcctgcgcgtgcaggatcataaatggcttacctgcgccagaagttgctggagcgtttgcgcaccatcggtgtcgttaaccaccatttcaatcaccgtggtggttggcgtgcgccaggcgtcggcaaatgccgtttcaagttcctgccagttttgcggacgatgatatttcagctcgaacatcgcggcggcgtgctcaaaatggacgttttgcggcatcagatagaaacgctcacgctcgctttgcggcgttggcaacagcgagaaaatttgcccgccgttgttgttcaccacaattaataccagcggcgcagaaacctgacgcaataacgccagcgcgttgagatcgtaaagtgcggagagatcgcccacaatcgccagcgtcggtttgccgcttgcccgctgaacgccggcggcggtcgaaagcagcccgtcgataccgctggccccacggttgctgtacaccgggtaacctgccggaagttgcgaaagcgcatcaatcagacgtaccaccaggctgttaccaacaaacaattgcccctgttcaggcagatagtcgcagatgcgatgcgccagttgcgcttcgccaaacgcatcacggcgggcaataaccgcctgcattgcctgttccgccaggcgcgggatttcaacgcaccagggctggcgtttttctgccggatgcagctccagccagtcggcaatattggcaattaagcgacgtccgcgatggtgtgccggatcaagtcgcccttcaatgtcatcaacaatccagtactcttctggttcacagcttgcctgccattgcaggagccgtttccccgtcaggctgcttcccagttgcaccacaatttgcgcctgctgcagctcgctggtcgctttggcattgcctaaccaaagatcggcacacggcagcggctgcccggtttgtgacagcacatcgccaatcagcggccagccaagagtttgcgcccacagggcaacttttttgccctcttccgcactcatgcgcccggcaaccaccacgccgcgcttttgtcgccagaagaaccagtcgcgctgtttttcactttccagacgaggcgcttcacgcagccacggtttgtcgtcctgccaccagtcacccagacgctgttgccagctaagcccggtatcgtccatttcgccatacagcggttcagcaaacgggcagttgatatggactccccccgcatgaagcgtaccgagagcgtggtcgatggtagaaaccagccaacgtgcggggatatcctgggtcgggcgcggcaatgaaatactgtgcgtggggtgagaggcgaacattcccggctggcgaattgcctgattcgcgccgcagtcaattagctccggcgggcgatcggcggttaagagaatcagtttttctccggttaacccggcttcaatcagtgccggatagagatttgccaccgccgtgccggaggtcacaatcaccgccaccggctgcttgctgactttcgccagccccagcgccagatgccccaacccacgctcatcgaaatgggtgtggtgaatgaatgcggaattctccgccgccgctaacgttaacggtgtagaacgcgagcctggggcgatacagatgtgtctgacgccgtgacgcgttaatgcttccagaatgaccgccgcccagcgtcggttaaatgcgcttactgacatgagtttgtccggtatcaatattgcggctaagtataaggagctacaaaaatagattattgatatgaatcggtaatgatgcgactcattactattccatttgtaataaagtacgcagccctgccgctttgttgtcgatttcctgccactcttgctcggggtcggaaccacggacaatgcccgcgccagcatataatcgcacgacattgccgctaatttttgctgagcgcagggaaacgcagaattcgctttgttgtaatgagagatagcccgcagaaccggcgtaccattctcgggtgaacggttcgtgacgggcgataaactgtcgcgccagatcgcgcggtaagccagcaactgctgccgttggctgcaactgatgtaaacagatcacatcatccgctttgttgagtgaagtccagatacagcggcgaagatgctgcactttacgcagacgcagtacctgcggcggtaaaacatccagcgtctgggtatcggcctgtaatcgttgacagatatcttccaccaccagcatgttctcgcgctggtttttatcatccgccatcagccactctcctaactgctgcgcctgcttatcatcaggattatttgctactgttcccgccagcgcttcagtacgcagcgctttgtcacgccgccgccataaccgttccggtgaagagccaagaaaagcattttcgccatcaaaggccatgtaaaaatggtagcaattcagattcagtcgacgactggcagccatcatcgccgccgcgttgaccggacttgcgaaatgcaggtcagttgcccgagcgagcaccactttgtcgagctcaccttcggcgatggttttcgttgccagttcgattaattgcgtccagcccgttttgtccggccagtgttgttctcgcgtggtggttaaatgtaacccaggcaagggcttgatactcaccagtgtggcgataaattcttttgcctgaatcgcatcgtgctgaagggagctttcgctgaatagcgtcagccgcagcgtggctttaccgccacagcgtcgccattccaggcggggtaaaagtaaattgccctgcgacgggtcaaaagcattcagcccccaaatgcgtaagtcggcgtgttccgggtgctggcgaagaaaacgttgtgcctggtccaacgacgtaaaacgggtaatcgcgcccaggacgacagcttcttcatcaccattacgttgttgccagtagaattgcgggtatgtttgctgactggccagccagctcaaggcatcaaaagcgtctttgagagggaaaggaatatcgataacccgaatgccgggtgtcgccggaatctcttgcgacaaatggcgcagtagattttccagcgccgtagtaagtgattgcacgcggacctctccctgttaaaagcctcacattatacggggtactacaaaaaaaatgcagtaccccggtgtagggaggttttaacggcgtgccagcaacagtcctagtaccagcccaacggccgcgcccacaccaattccttgccagggtttttcgtggacgtagtcatcagcacgataaactgcctgcttcgcccgatagtaataactgtctgaagcctggctaacccgttttttcacatcatccagcgctttttctgcacgcgctttcagctcaacatatttctgatcggcgggatcgccagaggagcggagcacctcttccagtgtttcactaagcagcgtcaggtcgtcatcgatacgtgtatcaccaaactgattagacattctcgttctccatttgcgtaaaacctgtcactaactatagacaagggttgttgattacgcctgaattacctcgcgtgccatcccaatgtgtgggataccatcttcttcatagacctccgtcacagggataaaaccgaaactctggtagaagttttgcagatgcgcctgcgccccgaggtaaacaggcttatcaggccagtgatgcgtacatgtttcgagtgttttactcatcagctgctgccccactttttcgccacgcaacgcttcactgacaatcacccgacctataacgaccggctcaagatcatcatcacttttcagaatcctcgcatacgccaccagttcatcatttttccaaccgagaatatggcgattatcccccgtcaaatcatcaccatcgatatcctgataagggcaattctgctcgacaacaaacaccgcgcaacgcagttgtaataaggcataaagctgggaaaccgataattcagagtgatgcagatcttgccattcaatcataatgctctccttttagatgtatgccttatactagccggaatattttttgaaacgtgatgaactcatggaattaatttttttaggtacttcagccggtgtgccaacccgcacgcgcaatgtcacggcaatattgcttaacctgcaacatccgacccagagcggactttggttgtttgactgcggtgaaggcacccagcatcagctactgcataccgcctttaaccctggaaaactggacaagatttttatcagtcaccttcatggcgatcatctttttggtttacccggcttgctgtgcagtcgttctatgtcaggcattatccaacccttaacgatttatggtccgcaaggtatccgtgaatttgtggaaaccgcgctgcggattagcggctcatggaccgattatccgctggaaattgtcgaaattggcgctggcgaaattctcgatgatggcctgcgcaaagtaaccgcttatccgctggaacacccactggaatgttatggctatcgtattgaagaacatgataaaccgggtgcattaaatgcccaggcattaaaagctgctggcgtgccgcctggcccactgtttcaggaattaaaagcgggcaaaacaatcacgctggaagatggaaggcagattaacggcgcagattacttagctgctccagtgccaggtaaagcgctcgctattttcggcgataccggcccctgcgatgccgcacttgacctggctaaaggtgtcgatgtcatggtgcacgaagcgacgctggatataaccatggaagccaaagccaatagtcgcggccatagctctacacgccaggctgcgacactagcccgtgaggctggagtcggcaagctaatcattacccacgtcagctcgcgctatgatgacaaaggttgtcagcacctgttacgtgaatgcaggtcaattttcccggcgactgaactggcgaatgatttcaccgtgtttaacgtttaactctgcttattattaaaaacagggcgaaacttgccctgttatcgcaacccgcgctacatatatccacccacacaggcatattgagcgatttttgatatttattcatctccttacgcactatattcagagcaataagttgcctcttttcatcttgattcagcacaacctttgcaactaaaaggagcccatgatggttacagttgtcagcaattattgtcaattatctcaaacgcaactcagtcagacatttgcagaaaaatttactgtgaccgaggaattactgcagtctttaaaaaaaacagcgttatccggagatgaagaaagcattgagttactgcataatattgcgttaggttatgataaatttgggaaagaagctgaagatattctttaccatattgttagaaccccaacaaatgagaccctatcgattatccgacttatcaaaaatgcttgtttaaaattatataatctggcacatatcgcaaccaactcccccctcaaatcacatgattcagatgatctcctgttcaaaaaactattctccccttcgaaattaatgacaattatcggtgatgaaattcctcttatatctgaaaaacagtcgctttcaaaggtgcttttaaatgatgagaataatgaactgagtgatggtacaaacttctgggataaaaatcgtcaattaaccacagatgaaatagcttgctatcttcagaagatcgccgctaatgcaaaaaatactcaagtcaattatcctactggtctctacgtcccctactccaccagaactcacctggaagacgctctcaatgaaaatattaagagcgatccatcatggccgaatgaagtccagttattccccataaatactggcggacactggatattagtttcgctacagaaaatagtaaataaaaaaaataataaactacaaataaaatgcgtcatattcaactcattgcgtgcactaggctatgataaagaaaattcacttaagcgtgtcattaatagttttaattctgaactcatgggagaaatgtcgaataataatataaaagttcatttaaatgaaccagagataatatttttacatgccgatcttcagcaatacttaagccaaagttgcggtgcatttgtgtgcatggcagcccaggaagtgattgaacaaagggaaagcaattctgacagcgccccctatacgttattaaaaaaccatgctgacagatttaaaaaatattcagcagaagagcagtacgaaattgattttcaacatcgactggcaaacagaaattgttatttagataaatatggcgatgcaaatatcaatcattattatagaaacttagaaataaaacactcacaacccaaaaatagagcatccggcaaaagagtgagttaacatcattgttaattaattcgaccagtcagcaaatatgctgactggtcgaacatagtttgctaaacagtcatcactgactgatgtcagtcacaccatccgccagttcaatcaggcgaataaattccgccctgtaaccctgtggatcttccccttttgcctgctgagcccactgtttgatctgctgccaggaggtattgttcaggtattcagaaccgcgtaacttttgcccatatgcagctactgctgcgcgaaaacgcatatcttcagagggcgcgtttattgttggccccagcgggaattcaactaactgactttcttttccctgcgggtatttccagcgaatttttaaccaggccagttctttcgttttgtccgatttcgctaatttgttatccggggcatagcgtaacttatcaattgatgctttttgcccgttcagcgttaattcgaataacaacgttatatgtttgcctgcgcctatatcccctgcatcaacgttgtcgttattaaaatgttccacccgaagttggcgcttttcataaccaatctgacggtattccgttacccacgcggggttaaactcaatttgcgctttgacatcttttgctacggtaatcaacatctgccgcatttcactattcaatactttctgcgcttcagagagggtatcaatgtagctgtagttgccgttaccaacatcggcaattcgcaccatcattgcctcgttgtaattgctattccccacgccaaacgtcgacagagtaacaccagactcccgctgttttttgaccattgattcaatcgattttggatcgtcaatgccaacgttaaagtcaccgtcagtggctaataaaatgcgattgatgccgcccttaataaaccccttcgtcgcctgctgataagccagttccagcccggcaccgccattggtactgccttcggcatccagcgaatcaattgcggcattaatttccgccttatgactcccggagatagaaggcaatgcaatacgggagtcgccagcgtaggtcacgatggcaatgttatcctgctcacgaagttctttgaccaataatttcaacgaagactggataagtggcaaacgttcatcagaaatcattgaaccagaagtgtcgataagaaagaccagattagaagctggtaactcttcacttttgcgatctttcgccaggatatcaactttcagcaatgttcgctgttcattccatggtgcaggtgccaattcgtagcgcatagcgaaaggtattggcttagaggccggaatagattgtttgtctttgatatcccaatcagacgggaaataattgactatctcctccacccgcacagcgtctggcggaggtaacagcccttgattgaggaaacgccttacattcgcataactgccagtgtcaacgtcaagactaaacgtcgccaacggattttgcgctacctgcttaaccggattatcatcgaactgctggtagcgagcggttcctggatttgcgatatgtgtagcttttgctttagccgctcttgcaaatgttggcgcttcctgcaatcgcccctgtaaagcctgtttgtctgaatattgttgcacttcttgctgggccaaggctttcgcggcggcggcgctttgctcagcctcttttattgcagcttgctgcgcggcaagcacttgctgctctgtgggagtactgggttgttgttgctgactttccttattctcaggttgcggcccacatcctgacaaaatcaaactactcataagcaacatgattatatttttatttcgcatataaaatccttttaaataaactcaggcaccagacataaaatatactctttgtataatcctgctaatcttaataaaatacaatatcgaaacccatagcaaataatgattcaacaacgcaacccattaataatttgcatatgaaaaaaataatctttgcttttattatattatttgtgtttttactccctatgattattttttaccaaccctgggtcaatgcattaccgtcaacgccccgacacgcaagtcctgagcaattagaaaaaacagttcgttatcttacacaaactgtgcatccacgtagtgccgacaatattgataatctgaataggtccgcagaatatataaaagaggtctttgtcagtagcggtgccagagttacctcgcaggacgtccccattacgggtggcccctacaaaaacattgttgctgattatggtcctgccgatggaccgctgattattattggtgcgcattatgactctgccagcagttatgaaaacgatcaattgacctatacgccgggcgcggatgataacgccagcggtgtggcaggattactcgaactggcacgtttgttacatcagcaagtaccgaaaacaggcgtgcagctggtcgcctatgcgtcggaagaaccgcccttctttcgtagcgatgaaatggggagcgcggtgcatgcagcttcgcttgagcgtccagtgaaattaatgatagcactggagatgattggctattacgactctgcgcctggaagccagaattacccttacccggcaatgtcctggctttatcccgatcggggagactttattgccgtggtcggcagaatacaggatatcaacgccgttcgtcaggtaaaagcggcattgttgtcatctcaggatttatctgtttattctatgaataccccagggtttattcccggtattgatttctctgaccacctgaattattggcaacacgatattcccgccataatgattactgacaccgctttttatcgtaataaacaataccacttgcccggtgataccgcagacagattgaattatcagaaaatggctcaggtagtggatggtgttataactttgttatacaacagtaaataataaaaatttctcgaggcgggtccagaaaaagcgacatgcacattttattttccctcatctgttttaagatgcgaaacatgaaattcaacggaggaaaaataaatgggaatgattggctattttgcagaaattgactcagaaaagattaaccaactgcttgagtctactgaaaaacctttgatggataatatacatgacacgctttcaggattacgccgactggatattgataaacgctgggattttttacactttgggctgacaggcacctctgcttttgatcccgcgaagaatgatccgctgagtcgtgccgtgcttggtgaacacagcctcgaagatggcatagatggcttccttggattgacctggaatcaggagttagccgcgacaatcgaccgactggaatcactggatcgaaatgaactgcgtaaacagttttccattaagcgactcaatgaaatggagatttatccgggagtgaccttttcagaagagttagaggggcaactctttgcctcgatcatgcttgatatggaaaagctgattagcgcgtatcgacgtatgctgcgacaagggaatcatgcgctgacggttattgttgggtgatatagcttgatgcctgggggagaaagacccattagttaagatttacgccaggatcatcttgaaaaaatctttaaccatggtccggtttttatccccttgtataaatattactaaatgcttgcttagtcgcattgttaaatgcaataccgtatattcggtatgtaacagcgatatcctctgtgctggcaacgatctgtcatgcttgatgaaaacggaattgaacctgtcattaccaggtagataaaaagcctgttcaattttgggattattttttataactcgtgtctgttatggcgacacgggaaaacatcaatattgtccttcacaaattgcagtaatatagaatcaacctctcttgcaagttggtcacaatgtattataagcattttgaatatgtcatcctctgtaatctcgtgaaaattttcggccttgtcttttagctcatcatatcggattcttgcagtaaccattttttgggcgagttctaataaccccaaagcttgcaattgctggtgagtatgatcactttcaaaaaatatcccacactccattccttcccaaccaacatattcatgccattcataaaccagcataaatgtttgtaaaactggcggtaataattggatatctgcaaaaccaaaccaaaacttacgcttgagatcccactcatattcaatcgccaatgctatattgtttaaggcatctccggcatccttatttttacgcaaaatcaattccgtcagtgtatagcgttgttcatcaatacgccgaagagcttctgcaatatcatagtttgtagccaacaaaacattctctgcttcctgatgagtgacgtctgcttttgccgtcaatatattgatttggtcaatatgaaacaacttgatggcttcatcaacatcaccgccagtcctctctaacaaacgtctggcaacctggataccgacaggtacgttcttccgaagtttacgaatttcacttaaccattccatgtcaaacccctttaaatatttatgatattaaatataacaacgtctggataacgacccggcctgactgaatatctcacgttttcctgcttaacattcatgttatgatgctcttgaaactaataatacgtatggaattgtcactatttatctgctaatgaattcaaacaatgtcattcgtttgatgaatatattatttcagggaataattatgacacctttagaacgcattacccaacttgttaatatcaatggtgatgttaataatcctgatactcctcgtccattgttatctcttgaggatttttttattgacaataatatccatggttcaatatgttgcaatgtgattccagaacaatctccgcaagctatctatcaccattttctgaaaatacgtgagcgtaacaatgttagtgatgttttggtagaaattacgatgttcgatgacccagactggccctttagtgaaagtattttagttatcaccactgcttcaccagaagaagttcagagctggtttgtagaagaaattgcccctgatgagtgctgggaaggatggtcagaagatacggagcatggatgggttgaagtccctgtgggtatgcatccggttacttgttggtgggattaaaacatttatataaacagataagcggatgtttacataaatttttatgtgaaggaacatgatgaaacttattcctcgcagtagtgatatttcacctggcattgatggaatttgcccggggccttttcctccgaacggatttaccgtacttacagatgcagcatatggtaacggagactgtttcggtttgtactggcctattggtcaggagcataaactacctatagtgtgcgaaacgtaccatgacgaatggcgaatcgtacctgccttttccagcattaagaagttcgaagaatggctggaagtgaatgatgatgatccccatgaaaatggcatcagcatcgaagatcaagactttgcagcaaatctcttccgtgttgctcggaaatgtctttcaacgggaaggcttgatgacgcactgccactgttacagcgagcaacagaacaattgcctgaagtcagcgaatattggttagcactggcaatccagtatcgccgatgtaaaaaaacagaagctgcagcacaggctgcgcttaatgcttatcttggcaattgggcatttggtgttcctgacaataaagtcattcatttgctgtcacaggccgcagatgtcccgaatttccaggatgatcctgtgattcagtgcattaaagaacaaggattagatcttagctttggaggaacaaaggaaaataataattaccccttgatgcagatgtgtgttgatacttattttgcgcagagaaaaccgcttcaggcattaaccctgttacataattatgcctggataatgtccagtgaaacgactgcatttcaggaacgctatgattttaatatcgatgaatggcgggcaaaattcaggcagttatgtttagagtattttggcgatagtcgtacacagttcacttaacgctctgcgtctatctactatcccttctttttcagaaaaaccgccgagcatgtcggcggctttctgacttacaaagtaacagattacatcagcggcattgccaaacgcacaatgctaatcagcggttgtggccatacacccagcaccagtaccaacagtgcagagatcagcacaacgataccgcccgcgctgtactgccagtttgatggtgcatcgcgacccggttgttccggggcgtgaagatacaggctcaccgccacgcgcaggtagtagtagaggccgattgccgaaccgacaaccacggcacccaccagccaccacaagtgtgcctggacaccgaccgccagcacgtagaacttaccgataaagcccagcgtcatcgggataccggccagagacagcatcatcaccgtcatcactgccgcgaggatcggacgatgccagaacagaccgcggtaagagaacagggaatcagcatccgggccacgatacgggctggacatcaggctgaccacgccgaacgcgccgaggctgctgaacagataaccggccaggtaaacccctaccgcttccatcgacatctcgccggtttgcagcgcaatcagcgctaccagcagatagccgaggtgagagatagatgagtaaccgagcagacgtttgatattggtctggctcagcgccatcaggttaccgaagatgatggaggcaaaggcgataatcgccagcaccacgcgaatcgcttcgctgtcacccaccggtgcgtagaggaacagacgcatcaccacaccgaagatagcgattttgctcgccgtcgccaggaaagtggaaaccggcgcaggcgcgccctggtatacgtctggcgtccacaggtggaacggcaccagagagagtttgaagccgaggccaacaatcatcaggccgaaacctgccagcaacagcggctcgttgagcataccgtcgccaaggtttttacccaacgcgacaaacgacaggtcgccagactgcgcatacaccagcgccataccaaacagcaggaaagaagacgctgcggcagaaaggatggtgtatttgatactggcttccagtgaacgtttctggcggaaagcgtaaccgaccaggccaaacagcggcaaagagatcagttcgataccgaggaacagagacgccagatggttggcattcgccagcaggatcccgcccagcgcggcaattaacaccaacaggtagaactcatccttgttgtcgttatagccttcaagccacgggtaggcgaaagtacaggtggcgaggctcgccaacaataccagcccggtgtaaagcatggcgaaaccatcaacgcgcatcagcggcgtaacgtccatagcgcccgcctggccaacaaaccagagcgaaaccagcgccgcgttaagcccaataaccgagagcgtagcgttgaggaaatgattgcgtcgccacgcaatggagagcatcacaaccaccaccgtcaagccgacgatcagcaacggtagcagtgcgatcaggttttgtggagttattgtcatggcgatttacggccttgtagtagtaacggaattaacaaaccactgctggatattgccaatcgcggagtgcgaggtatccagaatcggctgcggatagaagcccagcagtaccagcagcaccaccagcaacaggatcataaacagctcacgcagcgacatccctggcagttcctggctggcaatctggcttttcgctttaccgaagtaagcgcgatgtaacatcgccagcgaataaacagatgcaaagaccagcccaaaggtagagataacggtaatcaccggtacaacctggaagctgccgaacagaatcataaattcgccgacgaagttaccggtgccaggcatcccaagcgttgccaccgcaaagaacagcgacagtgctggcagccatttcatcttgctccacagaccgcccatcatgcgcatgtcgcgggtatggatacgttcataaagctgaccacaaagaataaacagacccgccgccgacaaaccgtgcgcaatcatctggattaccgcgccctggtaggccaactggctgccggtgtagatagcaatcagcacgaagcccatgtgggaaaccgaggtgtaggcgatcagacgtttgatatcggtctgggcgaaggccatccacgcaccgtagaagatgccgataacacccagccacatagcaattggcgcgaactctgccgacgcgttcgggaacagcggcagggagaaacgcagcaaaccgtaagcggcagttttcagcaagatccccgcgaggtcaacggaaccggcggtcggagcctgggagtgcgcatccggcagccagccatgcagcggaaccaccggcattttgactgcgaaggcgatgaagaagcccagcattaacaggtattccacaccactggacattggcgtattcagcagctcttcatagttgaaggtccagacgccggtcgcattgtagtgaacaaaaaccagcgccaggatggcaatcaacatcaccaggccactcgcctgggtgtaaatgaagaacttggttgccgccgtgatacgcgttttaccgtcagaggctttatgcccccacagtgcgatcaggaagtacatcggcaccagcatcatttcccagaagaagaagaacaggaacatgtcgatggcaaggaacacgccgataacgccgcccaggatccacatcaggttgaggtggaagaagccctgatatttttcgatctctttccacgaacatagtaccgccagcacaccgagcagaccggtcagcacgaccatcagcagcgacagcccgtcaatggcgagatgaatagagataccaaaacgcgggatccacggcatgtcgaattcagactgccactgcggaattccggcggattgcgtcagtgaataaccgccctgcaaccacagttgcagcgacagcgccagcgtcaatcccatggtgatcagcgcgatccagcgtggcaccttgacgccaaagcgttcggtctgccagcacaggaagccgccaataaagggaattaatattagccagggtagtaacatggcgatctttattccttgtaaaagtcccgtcaggaccggattttcaacgaattctcacgacagaaaattctcttcggactgggggtagtgtcggatgcaccgcgaaggcggcttatccgacctacgttcttatatgcccaggggcaatcccacaatccttaactcaacgcagtaccatcaacagtgccagcaccacgaccgcaccgatgctcatggatgccacataccagcgcagatagccgttctcacttaacagcagacctttacctgcaaagcgggaaaggacagccgggatgttcatcattgagttcagcggatcgcgtttcagcaaccaggcaatacccaggaacggcttgacgaacactttgtcatacagccagtcaaatccccaggcgttgtaccaccaggtgcccagcagacggcccggcgcactgttggcgatggaggtcaccagagtacgtttacccagccacagccaggctgccagcagaatgccgaccaccgcgaccacgccagaggtaatttccagggtcaacatgctgccgtgcgccagttccgtcgtttgcggaagcacgccctgcagcggcggtacaatcagtgcgccaacgaaggtggaaaggatcagcagcacaatcagcggcaggctgtgagttacccctttcacggcgtgagcgtgaatttgttcttttccgtggaagacgatgaaaatcatacggaaggtgtagagcgaggtcataaacgcaccgaccagacctgccaccatcagattgatatgaccattcgccatcgcacccgcgaggatctcatccttactgaagaagcccgcagtgaccagcggtagtgccgacagtgctgcgccgcccaccaggaagcagagataaaccagcggaatagatttacgcagaccgcccatcttgaagatgttctgttcgtgatggcaggccagaatgacggaaccggatgccaggaacagcagcgctttaaagaacgcgtgggtcatcaagtggaaaatcgccgcatcccatgcctgcacgccaagcgcgaggaacatgtagccaatctggctcatggtagagtaagcgagaacacgtttgatgtcggtctgtaccagcgcggcaaaaccggccagcagcagcgtaaccgccccgacaatacccaccagatgcagaacttccggcgtcatcaggaacaggccgtgggtacgggcgatcaggtagacacccgcggttaccatggttgcggcgtggatcagcgcggagacaggcgtcgggcccgccatcgcgtcggcaagccatgtctgcaacggcaactgcgcagatttaccgaccgcaccgcccagcagcatcagcgtcgcccacatcagcatgttattgccgtcagcaaagtgcgctggtgccagttccaccatttcgcggaagttcagggtgcccagttcgttgtaaagaatgaacagtgcgaaagcgaggaacacgtcacccacacgggtcacgacgaacgctttcattgccgctgcgccattcttcggatcggtgtaatagaacccgatcagcagataggagcacaggcccacgccttcccagccgaggtacatcagcagcaggttgtcggcaagcaccagaaccaccatgctggcgatgaacaggttggtgtaagcgaagaagcgagagtagccctcttcaccgcgcatataccaggaggcgtacatgtgaataaggaaacccacaccagtgaccaccgagagcatggtcagcgacaggccgtccagcaccaggttaaaaccgatgttaaagtcgcctaccgacatccacgtccacagcggctggctgtatgtctgctcgccgttagcgaagaaatcaacgccgataaaggcggttaccagcgccgccaggcccacagagcctacgccgacgatcgccgagacgttttcagaccagcgcccacgggagaatgccagcaggacgaagccaatcaatggcaaaataatggttaaggcaagcatgttcatccgcgcatctcacttactgaatcgatgttcaggttctggcgacgacggtgaagttgcagcagcagcgcaaggccgatactcgcttctgccgccgcgaggctgatggcgagaatgtacatcacctgaccgtcggtctggccccagtagcttccggcgaccacgaaggccagcgcggaggcgttaatcatgatttccagaccaatcaacataaacagcagattgcgacggataaccagaccggttaagccaagaacgaataagattgccgcgaggatcagtccatgttgtaaggggatcatgcgtgctcctccgtttttcttttcgcgctgtcgtctttacgattgctcagcacttcacccgcacgctcttcacgaccgacgtggaaggccacaaccagacctgcgagcagcagcatagaagccagttccaccgccagtacgtaaggcccgaacagcgtaatacccactgctttagcactgattggcgtaccgtcgataccctgatcgttaacaccgaggatggcgtaaacaatcaccaccagcatgatggccgacaaaattgccggaccaatccacacctgcggtttcagccactggcgttcctgttcgatttctgaaccgcccaggttgagcatcatcaccacgaacacgaacagcaccataatggcacccgcgtagacgataatttccagcgcaccggcgaagtaagcgcccagtgagaagaacaccccggaaatcgccagcagcgaaataatcaggtacagcagtgcgtgtaccggattggtatgggtgatcactcgcaaggtcgcaagtatggctatcaggccacagatataaaaagcgaactccattgcccctctccttacggtaacaggctcttgacgtcgataggcttggcttcgttctctgcttcgcccttatctttgccgtcgattgccatacctgccatccggtagaagttatattccgggtatttgcccggaccggagatcagcagatcctctttctcgtaaaccagatcctggcgcttgtattcccccatttcgaaatccggggttaactgaatcgccgtggtcggacaggcttcttcgcacagaccacagaaaatgcagcgtgagaagttgatgcggaaaaattccgggtaccagcgaccgtctttggtttctgctttttgcagcgagatacagccgaccgggcaggctaccgcgcagaggttacaggctacgcaacgctcttcgccgtccgggtcgcgggtcagaacgatacgaccacgataacggggcggcagatagaccggctcttccgggtacattcgcgtttcgcgtttggcgaacgcgtgcaggccgatcatccagatactacgaacctgggtgccgaaacctactaacaattcttttaaggtcatggtcttattgccccttattgcgcctgccagagaatgacagccgccgttaccagcaagttgatcagcgtcagcggcaggcagattttccagccgaaggacattacctggtcataacgcggacgcggtaacgacgcacgaatcaaaatgaacatcatcataaagaacgcggttttcagcgcgaaccagatgaatggcggtaacaacgggccttgccagccaccgaagaacagcgtcaccatcaatgcagagatggtcacaatcccgatgtactcacccacgaagaacagaccgaacttcataccggaatattcaatgtggtaaccatccgccagttcctgctcggcttccggctggtcaaacgggtgacggtgacataccgccacgcccgcgatggcaaaggtaataaaaccaaagaattgcgggataacgttccacacatgcgcctggctgttgacgatgtcggtcatgttgaatgaaccggcctgcgccaccacgcccatcaaggaaagcccgaggaacacttcgtagctcagggtctgcgcagaagcacgcatcgcacccagcaacgagtatttgttgttacttgaccagcccgcaaacagcaccgcgtaaaccgccagacctgccatcatcaggaagaacaaaatcccgatgttcaggtcggcaaccacccaacccggactgactggcacaatcgcaaaggccagcagcagcgaggtaaaggcaatcatcggtgccagggtaaagatgacgcgatccgagaatttcgggatccagtcttctttaaagaacattttgatcatgtccgcaaccagctggagcgaaccgccccagccaacacggttaggtccgtaacggttctggaacagacccagcaggcgacgttcgccaaagctcatgaatgccccgcaggtgacaaccaccagcaggatcaccaccgctttgaggatggtcagcaggatctcaatcagttccggtgatatccaactcattgttgtgcctccttgagatcctcaagatgcgcgccagccagcaccggagcaatgccggacatacccatcggcaagcccacctgccctgccgtcagtccttcggcgatttcaaccggcagcgtgaccgtgttgccatcgtaactaaaggagacgcgtgtacctgcgttcacacccaacttcgcggcatccgctgggttgagtttgatgtacggctgcggcatacggctctggaagaccggagcacgctgtgacaattcatcgctgccaaacaggtggtaatacggcgcgatacgccatttcccgtcctgcggctggaagcgtgccggtacgctggtgaagtaatccagaccattttcgctggtttcaaacagacgcacgcccggatcgccaaagcgcagtttgccgcccacttcgtcctggaatttgttccacgcctgcggggagttccagcccggcgcccaggcaaacggcacttgcgaacggtgcgcagtcggctggttgttaccttccatcgagaaggtgaacatggtgtcaatatcctgcggctgacgcggctcatgaacgctgatattggcgcgcatggcggtacgaccgctgtaacggtgcggttcacgggccagtttctgcccacgaatacggaatgtcgcatccggcgcagcatctttgatacctgccagttccgggattttcgccacaacagcgtcaatcacatggtcgagctgcgtccagtccacttcacggctcagcagggtgctgtgcagcgagtgtaaccagcgccagctttccagcatgacagttttgctgtcgtaataagcaggatcgtaaacctggaagaaacgttgggcgcggccttcgttgttgatcaccgtaccgtcgctttcagcaaagctggcagcagaaagtaccagatgggcgttttccataatcgctgtgcgttgatgatcaaccaccatcaccagcggtgctttagccagcgcagcattcacgcggatagcagaagcgtgacgatgcagatcgttttccaacaccaccaccgcgtcggcgcgtccggtttccagttcggttaacgcttcttcaagcgaaccgccacccataatgcccagccccatgctgttgacggaacgggcaatcatggtgataccgacgtcagcgccgcgacctttcagggctttcgcgacgttagccgccgcctgaatcacctctaagctaccggcgttcgtcccggagataatcaacggtttcttcgcacctgccagtgcctgcacgatgacgtcgattttgctttgcagctcaggttcgataccgtcaaccgctggtgcagagttatccagcgcatgggcgatggcaaaacctaaacgcgcctgatcttcaaccggtgcgcggtaagtccacgccgcgatatcatccagacgggtgtcatcaacgttggtaacaaacagcggatgcttcgcacgttgaccgatgttgaggattgccgcaatctgccagtcagccactttctgtgctgccgccatttcgcgcgctttacctttcacagcctgacgcactgccagcgcgacgcgcgcgccggtctgggtaacgtcttcgcccagcaccagtaccgcatcgtaagattcgatttcgcgcagagccggagtataaatgccgccttcacgcagcactttcagcgccagttgcagacgttcctgctcaccgtgagcgataccggtgtagaagttttcttcgcccaccagttcacgcagcgcaaagttgctttccacgctggcacgcggagaaccaataccgatcactttcttcgactgacgcagaatatctgccgcgccctgcattgcctgttcggcgttgagggtaatgaaatcatcgccacgacgctgtactggctgacgcggacgatccttcaggttgacgtaaccgtaaccgaaacgaccacggtcgcagaggaagtagtggtttaccgtaccgttgtaacggttttcgatacgacgcagttcgccgtaacgttcaccggggctgatgttacagccgatggaacattgctggcagatgctcggcgcaaactgcatatcccatttacggttgtaacgctcggagtgcgttttgtcggtaaatacgccggtcgggcaaatttcgaccaggttaccggaaaattcgctttccagcgtgccgtcttccgggcgaccgaagtagacgttgtcgtgcgcaccgtaaacgcccagatctgtaccgtcagcgtaatctttgtagtaacgcacacagcggtagcaggcgatgcagcggttcatttcgtgagagatgaatggccccaaatcctgattacggtgggtacgtttggtgaaacggtagcgacggaagctgtgtccggtcatcacagtcatatcctgaagatggcagttaccgccctcttcacataccggacagtcgtgcgggtggttggtcatcaaccactcgaccacgctttcacggaactgtttcgcttcttcgtcgtcaatggaaataaaggtgccatcggaagccggtgtcatacaggacatcaccaggcgaccacgcgtgtcttccgcgttttggtattgcttcaccgcacactggcggcaagcaccgacacttcccagcgccggatgccagcaaaagtaaggaatatcaaggcccagagacagacaagcttccagcaggttgtccgctccgttgacctcgtattctttgccgtctacatgaattgtagccattagcatgcttccagttttctcagtcagagactgagcgttaatcgaaattcggttaccagcgctctttcagcaggttcggctgaatcccattaatcaaatgggtattgctgaacggctgtttgattcccgcctcaaattcttcgcggaaatatttgatggcgctctgtaacggctccactgcaccaggtgcgtgggcacagaaagttttacccgggcctaagaatcgacacagttgctcaagtgtttcgatatcgcccggctgaccttcaccacgctccagcgcacgcagaattttcacgctccacggcagaccgtcgcggcacggcgtacaccagccgcaggactcacgggcgaaaaactcttccaggttacgcaccagcgacaccatgttgatctcatggtcaaccgccatcgccagcgccgtacccagacggctgcccgctttaccgatactttcgaattccatcggcagatcaaggtgcgcttcggtcaggaagtcagtccccgcgccgcctggctgccaggctttaaatttcagaccatcacgcataccaccggcgtaatcttcgaggatctcgcgtgcggtggtgccgaacggcagttcccacagtcccggatttttcacccgaccggagaagcccatcagcttggtgccagcatctttacttttcgagatgttctgataccactccacgccgttagcgaggatcgccggaacgttacacagggtttcgacgttgttgacacaggtcggtttaccccatgcgccggaggttgccgggaagggtggcttcgagcgtgggttagcacgacgtccttccagggagttgattaacgctgtttcttccccgcagatgtagcgccctgccccggtatggacgaacagttcgaaatcgaaacctgttcccataatgtttttgccaagcagacccgcttcggtggcttcggcaatggcacggcgcagattaactgccgcttcgatatattcgccacgcaggaagatgtagccacggtaagctttcagcgcaaacgcggagatgagcataccttccaccagcaggtgcggcagttgctccatcaacaggcggtctttataggtgcccggctccatttcatcggcattacacagcaggtaacggatgttcatggattcgtctttcggcatcaggctccatttcaggccagtcgagaagcccgcgccgccgcgccctttcagaccagcgtcttttacctgattaacgatttcgtccggagacagcccggtcagcgccttacgcgcgccttcgtaaccgtttttgctgcggtattcgtccagccacactggctgtttgtcatcgcgcagacgccaggtcagcggatgcgtttcgggagtacggataatgtttttcatttataccgctccagcagttcagggatcgcttccggggtcagatgcgcgtgagtgtcctcatcgatcatcatgtttggccctttatcacagttccccaggcagcaagttggcagcagcgtaaagcggccatcaaatgtcgtttgccctggtttgatgttcagctttttctcgagcgccgcctgaataccctgataaccgttgatatgacagaccacgctgtcacaataacggatcacatggcgaccaaccggctggcggaagatctgactgtagaacgttgccacaccttcgacgtcgcttgccggaatacccagcacatcggcgatcgcgtggatcgcaccatccggcacccagccacgctgcttctgaacgattttcagcgcttcaatggacgccgcacgcgggtcttcgtagtggtgcatctcgtgctcgatcgcttcacgctctgccgcactcagctcaaaagcctcggtttgtggttgttgattctcgtgcataattagcggtccacatctgacataacaaaatcgatactgcccagataaacaatcaggtcagacaccaggctgccgcggatcgccgccggaatttgctgcaaatgcgcaaagctcggggtacgaacacgggtgcggtaactcatggtgctgccgtcgctggtcaggtagtaactgttgatccctttggtcgcctcaatcatctggaaagattcattggcaggcatcaccggaccccacgacacttgcaggaagtgggtgatcagggtttcgatatgttgcagcgtgcgctctttcggcggcggcgtggtcagcgggtgatccgctttgaacgggccttccggcatgttgttgaggcactgctcaagaatgcgcagactctggcgcagctcttccactttaagcattacgcgggtgtagcagtcagaaacgccaccacccaccgggatttcaaagtcgaagttttcatagccagaataaggacgcgccttacgcacgtcgaagtcgatcccggtagcacgcaggcccgcgccagtggtgccccactccagcgcctctttcgcgccataggcggcaacgccctgggaacgacctttcagaatggtgttttgcagcgccgctttctcgtaagacgccagacgtttcggcatccagtcgaggaactcacgcagcaggcgatcccagccgcgcggcaggtcgtgcgctacgccgccaatacggaaccacgccgggtgcatacggaaaccagtgattgcttccaccagatcgtaaattttctgacgatcggtaaaggcgaagaacactggcgtcattgcgccgacgtcctgaataaaggtcgagatatacagcaggtgactgttgatgcggaacagttcggagagcataacgcgaatgacgttaacgcgatccggcacggtgatcccggccagtttctctaccgccagcacgtaaggcatttcgttaacgcagccgccgaggtattcgatacggtcagtatacggaatgtagctgtgccaggactggcgttcgcccattttctccgcaccacggtggtggtaaccgatgtctggtacgcagtcgacaatctcttcgccatcgagttgcaaaacgatacggaaagccccgtgcgccgacgggtggttcggaccgaggttgaggaacatgaagtcctcgttttcggtgccgcgcttcatcccccactcttccggtttgaaggtcagggcttccatctccagatcctgtttggctttggtcagctcaaacggcgagaattcggtagcgcgcgccggataatctttacgcagcgggtgacctttccaggtttgcggcatcatgatgcgtcgcaggttcgggtgaccgtcgaaagtaatgccaaacagatcccaggtttcacgctcataccagttagcgttcgggaacagtttggtgaaggtcggtacgtgcaggtcgttttctgccagcgccaccttcagcatgatgtcgcggttacgatcgatagaaatcagatggtagaaaacggaaaaatccgcggcaggtaacccttcgcggtgtgtgcgcagacgttcgtccatgccgtgtaagtcaaacagcatgacgtaaggtttcggcagtttctttaagaaatcgccaacttccagtaattgttcacgcttgatccacacaacgggaaccccggtgcgagtcgcctgaacagtaaaggcatccggcccaaaacggttgcgcagttcgccaatcaccggatcatcaagatgatcgcgggtctgccaggcgggttcttgcgcggttaagtcggtcatattgttcaccattgcaaatggtccgtggtgactgtcggcgcagtaagcttcgcgaaatagatttaggaataagcgaagaaaaatccctttgccgacaggcgcaaattaaatctcgtcaggtgtacgcaggttagttacggcaatgcgttcaccgcgcttgcgttcgcgctctgattgcatattggcgcgataaacgccctgatcgccaaccacccaggagagcggacgacgttctttgccgatagattcctgcaacagcatcagtgcctgcatgtacgcttcaggacgcggcgggcagcccgggatatacacatcaaccgggatgaatttatcgacgccctgcacaacggaataaatatcgtacataccaccagagttggcacaggcacccattgagataacccattttggttccagcatctggtcatacagacgctgaataaccggtgccattttggtaaagcaggttcctgcaaccaccatcaggtcagcctgacgcggcgaagcacgcaatacttctgcgccaaaacgcgccacgtcatgcaccgcggtaaacgaagtcaccatctcaacgtaacagcaggaaagaccgaagttatacggccaaattgagtttttacgaccccagttaaccatgtcattgagcttgcccataaacacgtttttgttaacttcttgctccagagggtcggttacgatctcctgcttttgcagggggtaacggtcgttctcaccgttgggatctatgcgggtgagcgtataatccatcttaatgcctcgcggttagcgttgacgattagcgatactgttcgtttccgggttcatacgctcgcggcgtgaacgcgcgggcgtccagtccagcgcgccaatacgcaccagataaaccagacctgccagtaacacaaaaataaaaattgcagcttccacaaagcctacccagccgctttcgcggatagaggttgaccatgcgaacagatacagcgcttcaacgtcgaagataacgaagaacatggccaccagataaaacttggcggacaggcgtaagcgggcggagccgaccgagtcgataccggattcaaacggcacgtttttcgacctcgcgcgtgcgcgaccgcctaaaaaccaaccgcctaccagcatcaggcaacacaggccaatggcaacgataagaaagatagcgaatgcccagtgatgagcgatgacttcagtggatgttgacatactcattgcttactcatcaaaagtagcgccagattcactgctcttcacggcagatggacgccacatcgattcatggggaggaataaaaaaaaccttacaatcactgtagaaattcttttatacagctaattgatgtggttttttactcctttctataaccttttgtcaactttaacaaaagtttcttcacattagtttacataatatcaacaccattagcatttaatgccctttcaccccagatccttgacgactccaggataattagatgttgttgaatcgtgtccgttgtgaagcaatggaaaaaatacgggtctattttgacaggaatttgtgtcgattcctccccccaaaagagagtattttcttgatctgtgacacgcttttgtcattccataacaaaaacgcagcaacaaatttacgtattttttaacatcattgtagcaggtgatttttttcaggcgattatttgtgcgttcgggacgtgaatctctggtggttgaaaaatgaacagttttgtacgttctgcactatgcgatgaaggatttttactaaaaaaaagccgctggggtttaaaacacccccagcggctcgttttttacactattgtctcaggaattatctatcgtccgtcgattactcgatatccctttcaatcaacaatgaatcatccccttccggagcagacattgggctgtattgccacggattatggtagctctccatcgcctgatagatcacctgggccagctcattattactggacggatcatagcacagcaaatattcggtatcaggtagcggcggtaagccatctactccactcagcacacgcaggtccgggctcatcatctcaaccggccttgccgtcacgccaagaccggctttcactgccgcacgaacggccggaagcgtcgaggcgacataagccagtcgccatggaatatctgctttattaagcgtcgccagcaccatatcgcgaaacgggctaggatcatccagcaatacaagagggatcggctcgcctttttgcaatatgtattccgctgcgcagtaccagtgtgttggcgaggtacgcaggttcaatgccttaaacgctgaaggacgatgggtggttaccatcaaatccacttcctgggattccagcatttctgccatataggcattacgtttaacgcggacatccagcgctaatttcggataaaccgaactcacgcgatttaacaggaaaggtaagatcgtatcggcagattcatctgaagcaccgatagttaatacgccctgaagattactgaacattaatgatgagcaggcctcatcattaaaacgcaggattttcctggcgtaaccaagaagttgaatgccatgttcagttaacagtttgttgcgaccgtgacgagcgaacagttctttcccaacgagttgttccagacgctgcatttgctgacttacggcggactgagtacgacacacagcggcagctgcggcagcaaaagtgttcagatcggcaacagcaacaaatgttctcagcagatcgaggtcgaggttaattatcggacgatttgcacttatcatatattatcacttactggcggctcatactgagctggttaatgctgtgcacacacaaacaagcaattccatttgtaatgtgcctccctggcagtttcatccggaacccggacgaaagtaaaaatgcatatgagttgcactaaaaaagcggtaatgactccaacttattgatagtgttttatgttcagataatgcccgatgactttgtcatgcagctccaccgattttgagaacgacagcgacttccgtcccagccgtgccaggtgctgcctcagattcaggttatgccgctcaattcgctgcgtatatcgcttgctgattacgtgcagctttcccttcaggcgggattcatacagcggccagccatccgtcatccatatcaccacgtcaaagggtgacagcaggctcataagacgccccagcgtcgccatagtgcgttcaccgaatacgtgcgcaacaaccgtcttccggagactgtcatacgcgtaaaacagccagcgctggcgcgatttagccccgacatagccccactgttcgtccatttccgcgcagacgatgacgtcactgcccggctgtatgcgcgaggttaccgactgcggcctgagttttttaagtgacgtaaaatcgtgttgaggccaacgcccataatgcgggctgttgcccggcatccaacgccattcatggccatatcaatgattttctggtgcgtaccgggttgagaagcggtgtaagtgaactgcagttgccatgttttacggcagtgagagcagagatagcgctgatgtccggcggtgcttttgccgttacgcaccaccccgtcagtagctgaacaggagggacagctgatagaaacagaagccactggagcacctcaaaaacaccatcatacactaaatcagtaagttggcagcatcaccaaaaaagcgactcacattgttccgttataatgcctgaagtagatcacagaatatatcttcagggatcgcatatctattaagttactcactcttttctatttatgacatgcgcgtgtttgtataaatgtaaatgtgagtccttgttccactctcgtgcagcatcgctggtcatacgcgaacacgtaccaacagcaatggtgaggcggcatcaagagcagggatccgtcatttatccgagcattttaccccaaaaaccttttatttataagggtcattgcgaattatctgatgcaaagttatgttatgttaggcaaagtaatcttctattattaataagcacatcaaaacctttttgaatattaaataataattaattagcatcatcctcattcattaattccgcttaacaatagtttcacaccttgcccccattgcgacacctcggaaatcatcacgcagttaaactctccgtaatgaggaaatatcatcatcgcgtttcattagtgaattcttaaatgaggcattttcacacaattatcttacagataaaaaaaccagacttacaattaagaatcagaacaattcactatataacattgcatgtaaagcatatacacctcattattttgtcattattaagttattaacagcacaatcgagccttcccctctggcaaaatcttattctgcagaccttcaaaacaccgtcctgggggagtacattgttctaagctgacttccacggcagggagtggcgataacagcaaaaaaggtcaagattcatgtcccccattgaaaaatccagcaaattagagaatgtctgttatgacatccgtggtccggtgctgaaagaagcaaaacgcctggaagaagaaggtaacaaggtactgaaactgaacatcggcaacccagccccgttcggttttgacgcgccagatgaaatcctcgttgacgtgatacgcaacctgcctaccgctcaagggtattgcgattccaaaggtctttactccgcgcgtaaagccatcatgcagcactaccaggctcgtggcatgcgtgatgttaccgtggaagatatttacatcggcaatggtgtatcggagcttatcgttcaggcaatgcaggcattgctgaacagcggggacgaaatgttggttcctgcaccagattacccactctggaccgcggcggtttcgctttccagcggtaaagcggtgcattatctttgcgatgaatcctctgactggttcccggacctcgatgatattcgcgctaaaattacgcctcgtacgcgtgggatcgttattatcaacccaaataacccaaccggcgcggtatattccaaagagcttttaatggagattgtggagattgcacgtcagcataatctcattatcttcgccgatgaaatttatgacaaaattctctacgacgacgctgagcatcactcaattgcgccgctggcacctgacctgctgaccattacctttaacggactgtcgaaaacgtaccgcgttgcaggcttccgtcaggggtggatggtgttgaacgggccgaaaaaacacgccaaaggctacatcgaaggtctggaaatgctggcttcaatgcgcctgtgtgctaacgttcctgcgcaacacgccattcagaccgcgctaggtggttatcagagcatcagtgaatttattacccctggcggtcgtctttatgagcagcgtaaccgcgcgtgggaactgatcaacgatattccgggcgtttcctgcgtgaaacctcgtggtgcgctgtatatgttcccgaaaatcgacgccaaacgctttaacattcacgacgatcagaaaatggtgttggatttcctgttgcaggaaaaagttctgttggtgcaagggacggcattcaactggccgtggccggatcacttccgcattgtcacgctaccgcgtgtcgatgatatcgagctgtctttgagcaagttcgcgcgtttcctttctggttatcatcagctgtaatcttaatttcactgccggagattgcatccggcagcgttatcccgccacaatgacctgatgatgtcatcatacgtaaggtcactatgaaacagagccatttttttgcccatctctcccgcctgaaactcattaaccgctggccgctcatgcgcaacgtgcggacggaaaatgtgtccgaacacagtttgcaggtagcgatggtcgcccatgcgctggcagctatcaaaaatcgaaaatttggcggtaatgtcaacgccgaacgtatcgctttactggcgatgtaccacgatgcctcagaagtgctcaccggcgatctccctactccggtgaaatacttcaattcgcaaatcgctcaggagtacaaggctattgaaaaaatcgctcagcaaaaactggtcgatatggttccggaagagctgcgggatatctttgcgccgttaattgacgagcatgcatatagcgatgaagaaaaatcgctggtgaaacaggcagatgcactgtgtgcatatctgaaatgtctggaagaactcgcggccggaaataatgaattcttgctggcaaaaacgcgactggaagcgacgcttgaagcgcgtcgcagccaggagatggactacttcatggaaatatttgttcccagcttccatctttcgctcgatgagattagccaggattcaccgctgtaagcagccggagtctgcgtcgcatcaggcaataagcgccggatgcgacatcaggctcttgtcaaaacggaaacagcatcgggatcatcaccacacaaaccgccatcacgataatggtgaacggtacccccaacttcacaaagtcactgaagctgtaatttcccggacctaaaaccagtgtgttaacaggtgaagaaaccggtgtcataaaggcggcggatgctgccatcgccacgaccatcgcgaatggataaggcgacacccccatcgttttggcagcagccagcgcaatcggagccatcaacaccgccgtcgcggtattagagataaatagcccaataaccgccgacaagacaaacaaacaccccagcatcatatgtggcccgtaaccaccgccaatgtccatcagccctttcaccgccagcgcgacacctcccgttttctgtaatgccacagcaaacggcatcatcccaacgatcaaaataatgctcggccagtgaatggatttataggcgctttcagcatctatacagcggaatttccccatcagcaggcaggcgatgatagcggcaacaggattaggaatttcatctgtcagcattaacgccaccattagcaccagacagaaaatggcatggggtgcctggctgtgcgcgggtgatgcttcactcacctcttccggtaagttcagcgctacgaagtcgcggccctgtttggccagcataccgatcagtttccagttacccacaaccaggatgatatcgcccagcagcagaggctcatccgccagcgaaccttccagcgccacgccattgcgctttagccccaccacattcagtccgtagcgggtacgaaaaccaatttcgcgcaccgatttaccaatcagttctgactcaggaattaatgaaatctctgccatgcccacatcaagggcctggtcagaaaaatactcgccgcgcagtaccatcggctccagcaattgctcactacaaaattgccggagatcgacatcagccgcagacatatcaataagcaaaacgtcacgcgcgcgaaattcagaaaccccattaacgttcacgataacgcgacgaaaacgccgccagcgttcaacaccgatgacgttagcgccataacgctcacgtaatttgagatcatccagccgttgaccaatcattggcgatccggggcgaatagccagacgtcgcgcacgcccggtcagtcgatattcacggataagatcgcgaaaggttcgacgcgtccagccttcgcgctgcggggtctgggtatcccctttcagcatgaaacgcatcactaacatatacaaaatacccagcaccagcacgaccaggccaataggtgttacgctaaagaaactgaagccgtgatagccttcacgcagcaattcactgttgactaccaggttcggcggcgtcgccaccagcgtcatcatgccgctaatcagcccggcaaaacttaacggcatcatcagacgtgacggcgacgtttgcatacgcatggcaacgcttaacaccacgggaataaagatagcgacaacgccggttgaactcataaacgcgccaagccccgcgacggtcagcatcaacaaaaccaacattttgatttcactattgcccgcaactttgaccagccatgttcccattacggtggcaacaccggtacggaccaaaccatcgccaataataaacaaggcggcaatcaggacaacgttaggatcagaaaagccggaaaatacttctgggactgtcagcgttccgcttaatgcaaacgcgacaataacaaacaaagcgaccgcatccatacgcactctgcccgtcgcaaacaagacgatggcaacggccagtaatgaaagaacccaaatcaattcaccgttcacaacttatccttgttaattgagggggatgacttgattctgccataaaaaagccccgacgagacggggctaaatcatgatcaggtgtttcactgaataataacatcgccatttggctgtttggtcacagtaatttgctccagactgtggaggaccaaatcgacctcattcaggcgcggggtatctgccggagcgttaaccgcaatgacatgacaacccgccgccaggccagaaagcacgccagcgggagcatcttccaccaccacacactcctgcggcgcaagccccagcagctgcgcgcctaacagatacgcatcaggttctggttttccgcgcttcactcgctcagcggttacaaacacctctggtgcgggaagcccagctattttatggcgcgctcgcgctaccggcatggagccagaagtcacaatggcccacggaatacctgctttattcaaatgactgagtaaggcgattgcccccggaagcgcggtaataccttcggtttccgtggcctcgatgtgctccagacgcgtaaactcggcggcaatatcagcctcggatttgcccgccataaaatggcgcagagaggtgatcgcctgtttaccgtgaatgaaagccagcacctcttccggcgctaacccatgacgtctggcccagttgctccacgcccgttctaccgcaggcagggaatccaccagcgttccatcaagatcaaacagaaaacctttgcaccgcacgcgggcctcctcaggcattgataatttgattaatttcgttggcgctcaaatggtactgacgcgggcaggcatgccacacattaagcatgcgctgatatttttcccacattggcgtctgggcgttaaaaccgtgagttccggcgtcaaaatgggtatagcgcccttccacattaaccataaagcggacataaccgaggtaacgtgcttcagtggcggcgtcaaagccgaggaaggtgacacgacgttcatcgatggattgctggtcctgcaaattagaccaggaaacatgcaacgcatgatacatctccataatgtcgatgatagtgcggcaggtttcttctttcagctcgccaaactcgcgatccaattcacgcatctgtaatccgtaaccacgctcaataattgtttgcaggcgacggtaacgttcagcatttgccggatcgagcatagtcatcatcttgtactgattagacaaaataagacgttgcgcgttggtcatttccattgttgactcctgtatcactctactacggtgaaaaaaaagaaggctgagtatgccttcttttatatgcgtaatcaggggtcaattacaaatcatcaaggaaagttttatccagttgtttgaaggcgcgcttaagcgtgtcagctaatgcctggtaatcaggcttgccttcaacgggtgccaacacctgtccagactcctgcaatttaccgcgaacttcataaaaccagttaaggattgcagggggtaatggcgtgacagaacgcttgcccagccaccacaatccctgcatgggtaaacttaaggcgaacagggcagtggcaactgccggcccaagctgaccgcccagggcaatctgccagcagagagtaaatacggcgatcggcggcataaaacggatcgcataacgcgtcatcttgataacgcgattttcgacaaagaccggggcaaggcgtttttccagcggccacgtctttgagtaatgctgtccccggcgaaacaagctaaaaaaattaacagaacgattatccggcgttgacatgcttcacctcaacttcacatataaagattcaaaaatttgtgcaaattcacaactcagcgggacaacgttcaaaacattttgtcttccatacccactatcaggtatcctttagcagcctgaaggcctaagtagtacatattcattgagtcgtcaaattcatatacattatgccattggctgaaaattacgcaaaatggcatagactcaagatatttcttccatcatgcaaaaaaaatttgcagtgcatgatgttaatcataaatgtcggtgtcatcatgcgctacgctctatggctccctgacgtttttttagccacgtatcaattataggtacttccatgtcgagtaagttagtactggttctgaactgcggtagttcttcactgaaatttgccatcatcgatgcagtaaatggtgaagagtacctttctggtttagccgaatgtttccacctgcccgaagcacgtatcaaatggaaaatggacggcaataaacaggaagcggctttaggtgcaggcgccgctcacagcgaagcgctcaactttatcgttaatactattctggcacaaaaaccagaactgtctgcgcagctgactgctatcggtcaccgtatcgtacacggcggcgaaaagtataccagctccgtagtgatcgatgagtctgttattcagggtatcaaagatgcagcttcttttgcaccgctgcacaacccggctcacctgatcggtatcgaagaagctctgaaatctttcccacagctgaaagacaaaaacgttgctgtatttgacaccgcgttccaccagactatgccggaagagtcttacctctacgccctgccttacaacctgtacaaagagcacggcatccgtcgttacggcgcgcacggcaccagccacttctatgtaacccaggaagcggcaaaaatgctgaacaaaccggtagaagaactgaacatcatcacctgccacctgggcaacggtggttccgtttctgctatccgcaacggtaaatgcgttgacacctctatgggcctgaccccgctggaaggtctggtcatgggtacccgttctggtgatatcgatccggcgatcatcttccacctgcacgacaccctgggcatgagcgttgacgcaatcaacaaactgctgaccaaagagtctggcctgctgggtctgaccgaagtgaccagcgactgccgctatgttgaagacaactacgcgacgaaagaagacgcgaagcgcgcaatggacgtttactgccaccgcctggcgaaatacatcggtgcctacactgcgctgatggatggtcgtctggacgctgttgtattcactggtggtatcggtgaaaatgccgcaatggttcgtgaactgtctctgggcaaactgggcgtgctgggctttgaagttgatcatgaacgcaacctggctgcacgtttcggcaaatctggtttcatcaacaaagaaggtacccgtcctgcggtggttatcccaaccaacgaagaactggttatcgcgcaagacgcgagccgcctgactgcctgatttcacaccgccagctcagctggcggtgctgttttgtaacccgccaaatcggcggtaacgaaagaggataaaccgtgtcccgtattattatgctgatccctaccggaaccagcgtcggtctgaccagcgtcagccttggcgtgatccgtgcaatggaacgcaaaggcgttcgtctgagcgttttcaaacctatcgctcagccgcgtaccggtggcgatgcgcccgatcagactacgactatcgtgcgtgcgaactcttccaccacgacggccgctgaaccgctgaaaatgagctacgttgaaggtctgctttccagcaatcagaaagatgtgctgatggaagagatcgtcgcaaactaccacgctaacaccaaagacgctgaagtcgttctggttgaaggtctggtcccgacacgtaagcaccagtttgcccagtctctgaactacgaaatcgctaaaacgctgaatgcggaaatcgtcttcgttatgtctcagggcactgacaccccggaacagctgaaagagcgtatcgaactgacccgcaacagcttcggcggtgccaaaaacaccaacatcaccggcgttatcgttaacaaactgaacgcaccggttgatgaacagggtcgtactcgcccggatctgtccgagattttcgacgactcttccaaagctaaagtaaacaatgttgatccggcgaagctgcaagaatccagcccgctgccggttctcggcgctgtgccgtggagctttgacctgatcgcgactcgtgcgatcgatatggctcgccacctgaatgcgaccatcatcaacgaaggcgacatcaatactcgccgcgttaaatccgtcactttctgcgcacgcagcattccgcacatgctggagcacttccgtgccggttctctgctggtgacttccgcagaccgtcctgacgtgctggtggccgcttgcctggcagccatgaacggcgtagaaatcggtgccctgctgctgactggcggttacgaaatggacgcgcgcatttctaaactgtgcgaacgtgctttcgctaccggcctgccggtatttatggtgaacaccaacacctggcagacctctctgagcctgcagagcttcaacctggaagttccggttgacgatcacgaacgtatcgagaaagttcaggaatacgttgctaactacatcaacgctgactggatcgaatctctgactgccacttctgagcgcagccgtcgtctgtctccgcctgcgttccgttatcagctgactgaacttgcgcgcaaagcgggcaaacgtatcgtactgccggaaggtgacgaaccgcgtaccgttaaagcagccgctatctgtgctgaacgtggtatcgcaacttgcgtactgctgggtaatccggcagagatcaaccgtgttgcagcgtctcagggtgtagaactgggtgcagggattgaaatcgttgatccagaagtggttcgcgaaagctatgttggtcgtctggtcgaactgcgtaagaacaaaggcatgaccgaaaccgttgcccgcgaacagctggaagacaacgtggtgctcggtacgctgatgctggaacaggatgaagttgatggtctggtttccggtgctgttcacactaccgcaaacaccatccgtccgccgctgcagctgatcaaaactgcaccgggcagctccctggtatcttccgtgttcttcatgctgctgccggaacaggtttacgtttacggtgactgtgcgatcaacccggatccgaccgctgaacagctggcagaaatcgcgattcagtccgctgattccgctgcggccttcggtatcgaaccgcgcgttgctatgctctcctactccaccggtacttctggtgcaggtagcgacgtagaaaaagttcgcgaagcaactcgtctggcgcaggaaaaacgtcctgacctgatgatcgacggtccgctgcagtacgacgctgcggtaatggctgacgttgcgaaatccaaagcgccgaactctccggttgcaggtcgcgctaccgtgttcatcttcccggatctgaacaccggtaacaccacctacaaagcggtacagcgttctgccgacctgatctccatcgggccgatgctgcagggtatgcgcaagccggttaacgacctgtcccgtggcgcactggttgacgatatcgtctacaccatcgcgctgactgcgattcagtctgcacagcagcagtaatctcgtcatcatccgcagctttgcgctgcggatatctgaaccggaaataatcactatttccggttttttattctcttaatttgcattaatcctttctgattatcttgcttaactgcgctgcatcaatgaattgcgccatcccactttgcatacttaccactttgttttgtgcaagggaatatttgcgctatgtccgcaatcactgaatccaaaccaacaagaagatgggcaatgcccgatacgttggtgattatcttttttgttgctattttaaccagccttgccacctgggtagttccggtggggatgtttgacagtcaggaagtgcagtatcaggttgatggtcaaacaaaaacacgcaaagtcgtagatccacactcatttcgcattctgactaacgaagcaggcgaacctgagtatcaccgcgtacagctgttcacgacgggcgatgaacgcccgggcctgatgaacttcccgtttgaaggattaacctcaggatcgaaatacgggacagccgttggcatcatcatgtttatgctggtgattggcggcgcgtttggcattgtgatgcgtacaggaaccattgataacggtatcctggcgcttattcgccatacccgcgggaatgaaattctctttattcctgcgctgtttattctgttttcacttggcggcgcggtatttggtatgggagaagaggccgtcgcctttgccattatcatcgcaccgctaatggtccggctgggctatgacagtattaccaccgtcctggtgacctatattgccacgcaaatcggttttgccagttcgtggatgaacccgttttgtgtggtcgttgctcaggggattgccggcgttccggtgctttctggctccgggttgcgcatcgtggtgtgggttatcgccactctgattggcctgatctttaccatggtgtacgcctcacgagtgaaaaagaatcctcttctgtcacgcgtgcatgagtccgaccgcttctttcgtgaaaagcaggctgatgttgaacaacgtccgtttacctttggtgactggctggtattgattgtcctgaccgccgtaatggtctgggtgatttggggcgtgatcgttaatgcctggtttattccagaaattgccagccagttcttcaccatgggtctggtgattggcatcatcggcgttgttttccgccttaacggcatgacggttaataccatggcttcatcctttaccgaaggggcgcgaatgatgatcgcccctgccctgctggtgggtttcgccaaagggattttgctgctggtcggtaatggtgaagcgggtgatgccagcgtgttaaataccatcctcaacagcattgccaatgccattagcggtctggacaacgcggtcgcggcctggtttatgttgctcttccaggcggtatttaatttcttcgtgacgtccggttctggtcaggcggcgttaaccatgccgttactggcaccgcttggcgatctggtcggtgttaaccgtcaggttaccgtgctggcgttccagtttggtgatggcttcagtcacatcatttacccaacctcagcgtcgttaatggcaacgctcggtgtgtgcagggtggacttccgtaactggctgaaggtgggcgcgaccctacttggactgctgtttattatgtccagcgtcgtagtgatcggcgctcagttgatgggctaccactaaaaatgttaagagccgcaattgcggctcttttttcattctgccgtttcagtctctacggcttcatttttggcattgcgcttcatccacaacgctagcgctttcagcgagtctggagtgaactcatcgcagcgtgcggtgatttcttccggcgtcagccagcaaacttcactgacttcatcttcctgtagtgcgaagggaccgtgagagacgcagctgaacaatgcgccccagacacggcaatttttatcttcgaaatagaactgcccgtgctcggcaaaggggacaccggcaatgcccaactcttcttccgcttcgcgacgcgcggattccagcagttgctcatcggcctggactacaccgcctgcggtcgcatctaacatgccgggtaaaaagtcttttgtctcggtacgacgctggaccagaattttgcccatgccatcatgcacgacgatgtaagttgcacgatgacgcagacactgtgcccgcatttgttcccggctggcttgtgcaatgacttcgttctcttcattgacaatatccacccattcagtacttgccaaacgacgctgttccattatcaggaaaccttctttttctggcgctcttacggcgcattttgagttgtgggtaaattacggattaatcgcgacctgcgcaatgatactttgatcattgagtgcgattacactaagtacgtcattatccagcatgccataactcgccggattaccgcctttcggaatactcaccgagccggggttgaagtggaaaatctccccccgctgttctgccactggcagatgggtatgaccgtacaccagcacatcgttctggtttaaagcaggcagattttccgggccaaaaagatgaccatgcgtcaaaaacagacgttgtttttccagtaatacctgttgccacggcgcggttatcgggaaatgcagcagcatttgatccacttcgctgtcgcagttgccgcgcacagcgataaccttatgtgccacttcattaagccgttcagcgactttggctggcgcgtaaccctccggtaaagcattacgcgggccgtgattcaacacgtcgccaaggatcaccagccactgggcaccgctttgggcaaacaactccagaacacgttccgtcgccggtaacgacccatgaatgtccgatgcaaacatcagtttcatcactcactcctcgtcgaaaaaacgtaagctatgatactggattctgtcgttgctatcagccagattgcttcgccgaaagtgcaataaaacgctggacagacgctcgctgccactggaatgttgcataatccaccaggcgttctggcacctcatcgccatgtagtaccaggcggttaatcattagcgccagatcagtatcagcaatgcaccattcaccaaataaattcggctgacccagtactaacaaatgttctgccatcgcgaacagtttctctgcactggcttttccctcggccgttagtggcgcttttttcgcccccgcaaagacaacatccgtcggacgctcttcgcggatgggcatcagatcgctgcgcagccaggcctgaatctgtcgtgcacgcgcacgattttctaaatcaagcggataaatacgttcccaggtcggtggcgcaaatcgatcttccagatactccgcaatggcagaagattcactcaactcaaaatcatcgatttgtaataacggcacacggcgtgtctgaccgtaaccttgccacgtcggctgcaaatgttcaccgctgtcgaggtcgatggtcttgatatgaaacgacaggcctttttcctgcaacgccacccaggcggataacacataaggggagaaaaagtgggcatctgaccaaagcgtgatagcgggtttactcattatgtcctcggcaataaagggggctggctatcaaactatagagcctttttgtcactgtcacgtgacgaatactcacgtaagtcgccgcgctttctatacttgtggtgttcagatgattaaacaaccggagctgcaatgatcgatctctatttcgccccgacacccaatggtcacaaaattacgctgtttctcgaagaagcagagctggattatcgcttgattaaggtagacctggggaaaggcggtcagtttcgtccggaatttttgcgcatttcgcccaacaacaaaattccggcaattgttgatcattctcctgccgatggcggcgaaccgctaagcctctttgagtctggtgccattttgttgtatctggctgagaaaacaggactctttttgagtcatgaaacgcgtgagcgcgccgccacattacagtggttattctggcaggtaggcggactggggccgatgcttgggcaaaatcatcattttaatcacgcagccccccaaaccattccttacgctattgaacgttatcaggttgaaactcagcgtctttaccatgtactgaacaagcggctggaaaactcgccctggctgggaggcgagaactacagcattgcggatattgcctgctggccgtgggttaatgcctggactcgccagcgaattgacctagcaatgtatccggcagtcaagaactggcatgagcggatccgttcgcgccctgccaccgggcaggcactgctaaaagcacaactcggtgatgagcgttcggatagttaacagaaacaggttctcgtgtattatttcatcctaagtaaaacaacggagaacctgcaatggcacaacctgccgctattattcgtataaagaaccttcgtttgcgtacgtttatcggaattaaggaagaagaaattaacaaccgtcaggatattgttatcaatgtgacgatccactaccccgccgataaagcgcgcactagcgaagatatcaacgatgcgctgaattatcgcaccgtaacgaaaaacattattcagcatgtagagaataaccgtttctctttgctggaaaaattaactcaggatgtgctcgatatcgcacgtgaacatcactgggtgacgtatgctgaagtggagatcgataaactgcacgcgctgcgctacgccgattcggtatccatgaccttaagctggcagcgttaatcgccatatcgggaggctgcatgaacatagtgatcaccggagggacaggattaattggtcgccatttgattccgcgtttgctggagctgggccatcaaattacggtagtgacgcgtaacccgcagaaagccagttccgttctcggccctcgggtgacactatggcaagggcttgccgatcaaagcaacctcaacggcgttgatgcggtaatcaacctggccggagaaccgattgctgataaacgctggactcacgagcaaaaagagcgtctctgccaaagccgctggaatatcacgcaaaaactggtcgatttgattaatgccagcgacacgccaccgtcggtactcatttccggctcggcaacgggctattatggtgacttaggtgaagtggtggttaccgaagaggaaccgccgcataacgaatttacccataaactctgcgctcgctgggaagaaattgcctgccgggcgcaaagtgacaaaacgcgagtgtgcctgctgcgtaccggtgtagtgctggcaccggatggcggtattctcggtaaaatgctgccgccgtttcgtcttggcctgggcgggccgattggctctggtcggcagtatctggcctggattcatattgatgatatggtcaacggtattctctggctgctggataacgagctgcgcgggccatttaatatggtttcgccctacccggtacgcaatgaacaatttgcccatgcgctcggtcatgcgctgcatcgcccggccattttgcgcgtccccgcgaccgccattcgactgttaatgggcgaatcttcagtactggtattaggtggacaacgcgcgctgcctaaacggctggaagaagcgggttttgcgtttcgctggtacgatttagaagaggcgctggcggatgtcgttcgctgatgtggtttacagcaaacatccgccagttaactcccggtgttacaggattagtggctttgcgcgataagatcgtctggtgaaagtcgggtcaccatcataactaactctctgtctaaacctctatccagcatctcctgagcaatacgcagggcttcttcgtgtttgccctgcattgcgccttcttcacgtaatctgtcagcaatggtcatcagtttctccttttcttgtggtgcgcgttccgctatctcaccaataaatgcacgaaaacgctgggcatcccctgtttgtaatacgtaattaaacagggcttttagctgtctgtcattagtgttccctgtaactagcagcgaaacaatttggtcgactaatcccaacagatcgcgctgacgaatatgtttctgaattaactccaacagcgccattttgcggtgttgcataatctcgtcatccggcaccacggtaatatccaccaacggaaaagccgatgaatatattttgcgggctatagcaggctcggcaaattcatcaagccagcagagtgaataaggataaggacttctgcaaccatgataaaacagcatcgggagcaccaatggaagctctttatagcccgcatcaagatggttttgcattgccgcaatggaataacgcatcatgcgaaaagccattaattcttccggcttactttggtgctctatcactacataaatataacccactccctcctgcgttttcacagaccacaagaggtcggaataatattgccgcaggtcttcatcaataaaactgtttggttccagtttaagcgtcgttaaatcacacagtttgcgcagcggcgcgggaagatgaatatcaataaaatcccgcgcggtgtctggatggcgtaaaaaagatttaaataccgcatcatgcggcgtggaagttgtcgatattgtcatggcgttccgtcacccctcaaatttaagatgacgcgacaataaccacgattaacacccaatgcagcaggcagtttttatctttggacagcgaattcagaagtatttttagcggactgtaacttttacatttcagcggaagctgactcgcaaattccccatgaaaatactccggcagcgttagccaccggagaggaaattatttcagcgatcccttaaggaaccgttgcagacgagggctttgcgggttgccaaataactgctccggcgcgccctcttcttctattttcccctgatggaggaaaatgacatgagtagaaacatggcgagcaaagcccatttcgtgagtcactaccaccatggttttcccctcttctgccagttgctgcataatacgcaacacttcgcctaccagttcaggatcgagcgccgaggtaggttcatcaaacagtaaaacttccggttccatcgccagcgcccgcgcgatagaaacacgctgttgctgaccgccggaaagatgcaccggatatttcccctgcgcacgttcgtctatcccgacttttgccagatacttcaccgcccgctcgcgcgcttcctgcttgctcaggcccaacacctgaatcggcgcttccatgacgttttccagcaccgtcatatggctccagagattgaagtgctggaataccatcgtcaggcgtgtgcgcagtaagcgcagttgatttttatcggcgactttgagttgaccgtctttgtcgcgcaccagattgatcgtctggccattgaccacgatcgacccttcactcggtttttcgaggaagttaatgcagcgcagaaaggtacttttccccgatcccgacgatccgatgatgcttattacatctccggcattcgcttgcagtgatacccctttcagcacttcatgttcgccgtagcgtttgtgcaaatcgataacgtttaatttattctcggacatcgtattctcagtgcgttgaagaaggtttcacatgctgcaaccagcgtttttccgctctgcgaaagaggctgatcaggacataagagatgattaaatagagcaccgcggcaatgccgaaggcggtaaaaggttgatacgtggcggcgttaatatcgcgggctattttcagcagatccggcaccgtggcagtaaatgccaacgcagtagagtgcagcatcaggatcacttcgttgctgtatgccggtaacgcaatacgcagcgcagaaggcaaaataatgcagcgatacattttaaaagtcgagaagccataggctctggcggcttcaatttccccatgcggaaccgaacggattgccccagcaaaaatctcggtagtgtaagcgcaggtgttaagcgtcagcgccagcacggtacagttcaggccactgcggaagaaagcgttaaggaattcggttcccttaacaatctcaagcgtgtacatgccggaatagaacaccagcaactgaacatacagcggcgtaccgcgaaaaatataggtaaataaccagattggaaactggatgtatttattactggagacacgaccaatcgccagaaacagcgccaggactccgcctatcactaccgacaaaataagcagccacagagtgatcgccacaccagtaaagcgataaccgtcggtccacagcagcggtttccagtattcatgtaagatttcgatcacaggtcagccctcttcacacccacggagtagcggcgctcaaggaacagcagcacaccattggaaacagtggtgaaaaccaggtaaatcacgccacagacgatggcgaaatagaacggttcccaggtacttttgcctgccagttgggtggctttgaccacatcttccaggccgagtaacgaaaccagtgcggtagatttgaggatcacctgccagttgttgccaatgcctggcagggcgtaacgcatcatcgacggaaacatgatccgccgaaacacttgcccacgagtaaaaccgaacgccgtcgccgcctctatatgtcctttcggcactgccataaaagcaccacggaacgtttcggtaaaataagcaccgtagataaaaccgagagtgataataccagcgaccatcggatcgatatcaatctgcccgacgcccatcgcctccgtcaccgtgtttagcgcaatctgcaaaccgtagaaaatcagcagcatcaacactaagtccggcacgccacgaatcagcgtggtgtacccttcgaaaatcagccccgaaagccgattttgcgagagcttaccgccagcgccaattaaaccgatgattacagcgagcactacagagctgatagccagctccagcgtgacgagcgcaccctgtaaaataacacctgaaaacccatacaacatgctgcctgtcctgtcgtgtgtggtgaattaccgcctcttgtctccctccggttacccgaagggagcgggctttctttcaccgatggcgattagccaccataaacatcaaaatcgaagtactttttcgctaatttctcgtaagtaccgtcagcgcgcatttcggcaaaggctttgttcagtgcttcgcgcagttcgttatcttctttacgcaggcccatgccggtccctacgccaaacagtttttcatctttaacagacgggccaccgaatttgtaatctttaccgacaggttgtttgaggaaaccttcgctggcagcgacctcatcctggaacgcggcatcaatacgtccggcagtcaggtcagaataaatgttgtcctgcccctgatacgagacgatttcaatgccttttggtgcccaatgttcattaccgaacgtctcctgggtggtgccctgcaatacgcctacccgtttgcctttcagcgactcgactgtcggctgaatgtcagaatttttcgccaccaccaaacgagaatcggcagcgtacagtttgtcggtgaaggctatttcttgctgacgtttttccgtaatggaaagcgatgacatgatggcgtcaatcttcttcgcttttaaggacgggattaacgcatccagcggattttcgacaaacgtacattgcgtattgatgcgtttgcataattcctttgccagatcgatatcgaagccaaccagttcgccttgtgaattttttgattcaaatggcgcataggtcgggtcggtaccgatgcggatgttttgcggaatcgcagcaaacgccgcagttgcgctggagaaggccagaaccagagagagcgatagcaccagttttttcataatgtcctcaactgacagtctttttatagggaatatttacaggtttgttacacttatcgtgccataaaattgaccatcaaggcaaaatatcccgccccgttagacgtattatttttcattaaaaatgcttaagtatgcatttcaatgcaccacgatagtgcaacaaacctggcgtgcaccatgatgatcattccatcaggtacagcttcccagcgacgtatcagtcaccgtagacattaaagtcgaaatactttttcgccatcttgtcgtaggtgccgtcctgacgcagctcgccaagcgccttattgaaggcagccgtcagttcagcatcatctttacgtagccctacaccggtgccatcaccgaagtattttttgtcttttactgatgagccagcaaaggcgaaatctttaccagcaggttgcttgaggaatccttcgctggcagcaacttcatcttgtaacgcagcatccagacgtcctgcagccagatcggaatagaccaaatcctggttggcataggccaccacatccacgcctttactacgccaggtctcgttagcgtaagcttcctgggttgatccctgcagcacaccaacatgtttacctttcagtgaatccagcgttggctgaatcggtgaacctttggccgcaatcaaacgagaatctgcggcgtacagcttgtcggagaaggcaatctcctgctgacgtttatcggtaatggaaagcgacgaaataatagcgtcgatttttttcgctttcagtgaggggatcagcgcgtcaaagtcactggcaacccaggtacatttcacctgcatccgtttgcacatctcgttaccgagatcgatatcaaagccaacaaaatcacctttagcatctttcgatgagaacggtgcgtaggtggtatcggttccgatacgtaccgtctccggtagcgccgcatagctggaagccgctgtggagagaccgactaacaaagacagagcgagaatcgacttcttcatacataaccctcaagtgaaaatggcttttttatgttgtgtattgtgttgtgtgtttgcaggctctttcatgcaggtcttatgccatcttgacgacaacagtaacattcaacgttaaatatgttaataagacgttgcattattgtcctgaagttgaagatagcaggtatagcggttgaatcgcagcgtttcgattgaatggcagaaacaaaatgtcgaggatttgatcgcggttgcaaaattgccctgaaacagggcaacagcggagttatgcgccctgccagcgggcaaagagatcttcaggaagggttatcgcaaactggtcaagaacacgattaaccgtctgatttatcacatcatcaagggattgcgggcgatgataaaacgccggaacgggaggcataatcaccgcaccgatttctgccgcctgagtcattaaacgcagatggcctaagtgcaatggtgtttcacgcacgcagagcaccaacgggcgacgctctttcagcaccacatctgccgcacgggtcagtaagccatcagtatagctatggacaatgccggaaagggttttgattgaacagggtaaaatcaccatccccagcgtctggaaagaaccggaagagatgctggcggcaatatcgcgcgcatcgtgcgtgacatcggctaatgcctgcacttcgcgcagagaaaaatccgtttcgagggataaggtctggcgcgctgcctggctcatcaccagatgcgtttcgatatctgtgacatcgcgcagaacctgtaataagcgcacgccataaatcgcgccgctggcaccgctgatgcctacaatgagtcgtttcataaatagttgccctgtcagacttgcaggcagactttgcaggatttcggcgggagttgcaagtcagggtgccagaccggcaccctcagcgaaggcatcatccttcgttatgcatttcgagattttccacttcgttctgacgttgcactgctttggcgtcatcattacgtaacgtatcgaggaaatcgaggtagccctgatcaacatctttggtgacgtagacgccgttgaacaccgagcattcaaactgctggatatccggattttcagcgcgaacggcgtcgatcagatcgttcagatcctggaaaatcaacccgtcagcaccgatgatctggcgaatttcatcaacttcgcgaccgtgagcgatcagttccgtggcgctcggcatatcaataccataaacgttcgggaagcgaatttccggtgccgcagaagcgaggtacactttcttcgctccggcttcgcgtgccatctcgataatctgctcagaagtggtgccacggacgatggagtcgtcgaccagcaggacgtttttatcgcggaactcggcgcggttggcattcagtttacggcgcacggacttacgacgcagctgctggcccggcatgataaaggtgcggccaacatagcggtttttaacgaagccctggcggtacggtttgcccagaatacgagcaatttccagcgcgatatcacacgaggtttctgggatcgggatcaccacgtcgatatccagatcttcccattcgcgggcaattttctcgcccagtttcgtgcccatattcacacgcgcgctgtaaacggaaattttgtcgataaacgagtccgggcgggcaaagtatacatactcaaacaggcacggattgctgaccggattgtcagcacattgacgggtaaacaactgcccttcttcagtgatgtaaatcgcttcgcccggcgcgacgtcacgcaggaaatcaaagcccagcgtatcgagcgctacgctttcggaagcgaccatatattctgtacggttctcgtcaatatcacgttttcccagtaccagcggacgaatcccgtttggatcgcggaaagcaaccataccgtggccgataatcatcgccacacaggcatacgcgccgcggattaagcggtttgtggcagcaatggcagcgaaaatattgtcggcttccagcgggtagtggcggaagttgtccagctcgctggcgaagatattaagcagaatttccgagtcggaagtggtgttgatgtggcggcgtttttcttcaaacagttttttacgcaactcgtgagcgttggtcagattgccgttgtgggcaagcgtaatgccatacggggagttaacgtaaaacggctgcgcttcagaggcgctggagctgccagccgtggggtaacgcacatgaccaatgcccatattgccctgcaaacgctgcatatggcgagcttcaaatacatcgctcaccagcccgttcgctttacgcaaacggaagcagttattggcatctatggtgatgatgccggcggcatcctgaccgcgatgctgaagcaccgttaaggcatcataaatcgactggttaaccggcataacaccggcgataccgacaataccgcacatacgtctttttcctcgttaagccacatctcagagcacttacgctctgggcaagaaacttgacgagctttgcagataatcaaaaaaacatctgatgataaaactgaattgcgggatcagctgtgatttgctccagtcttcgcttttcgacaccccggtaaaggagtcgagaaagaagagaatggcagcaacaatcaacacaccgcgcaacgcaccgaaacagacgcccagcacccgatcggtgcctgacaaccccgttttctccaccaactggcctatcacgaagttcacgatagcaccaacgatcagggtagcgataaacagtaccgcgatggcaatcccatttcgaaccagttcgtcttcaaagcccgtaaaccagactgacaggtaagtgtagtaatgactggcaacaaagaaagcacaaccccatgtcaccagcgataacgcttcacgaacaaagccgcggatcaggctaaccagagaggaaaaagcaatcaccgcgattatggcgtaatcaatccagaccatatgtgtcccacgattttacgccctgtcatcctgttcggggcgcattctaacagaaaaagaaaacgtttgcgtagggatttccttcccgcgcatcaataaaaatggcgctgaaaaaatattcaacgccatcgactttttatgcctttgcggcatcgggcaatgcgtgtcggatgcggcgtaaacgccttatccgacctacggttctacccctgcgtaggcctgataagacgcgccagcgtcgcatcaggcaagaccgtattaattcggcgtatagcccattaccacgccacttaagccagaaagttgcttcaactcacccagcgaacctttcagcttatctttcgaggcatccggcccaaccagaatacgggtaattttaccctgcactggcgtggatggcgacgtataaacccgataaccggcaccgcgcagcttaccgacaatctcattcactttatcggcatttttcagcgcacccagttgcacaacataggctttacccgtcggtgcagctttttcttccacgaccggcttcggttctggcttcggcgcaggtggtgcttcaacctttggtttaggcggctccaccggtttcggcttcggtggggcgaccggtgcaggttccggttcaaactcggtgttattggctgcaatagtggccggatcgagcgacggtgctgcggcatcacctgcccgcacctcttccgctgcgccttccggcggctgcgtcggtaacgcctgggtggcggctggcatcatatcaggctcatcacgatcgcccgctttcggcaccagcgggatagccgcgaactcatcctgataatgttttttctgcccgtccagcagccctggaagtacaatcacccccagcgccaccagcacgatcgtgcccactaaccgattctgaaacttacttgccaccgcttctcctcgcgtcaatcacttccatgacatgtgcgaccgtgtggaaagaaccacacaccagcacggtgtcttccgctttagcgtccgccattgcggcatcccatgcctgcgcaacgctatcaaatgatttgccgttacccaaatgctcaagcagttgttctgccgtggcaccgcgcggcccttccagtggcgcacaataccagtcatcaaccacgcttttcaaccaggccagagttccggcaatatctttatcatgtagcataccgataaccgccagcacgcgcccgtttttcggtagcgctttcatacgcccggtgagatattccgccgcatgtggattatgcgcgacatcaaaaataacgcgtggcgactcgctcacaatctggaaacgtcccggcaaaattgcgctggcaatcccgtcgcgaatggcattttcactgacttccagcccgctggcacgcagtgccgccagcgctgttgcggcattcggttgcgggacaagcggcaacggcagattttccagcgtgccgtgagcatcgctaaacgcccagtcatgatcggtgacggaatagttccactcaacgccccgacgttgtaacagtgcacctttttcctgcgccacatcagcaatggtagaaggcatttccggctcaccgacaattgccggtttttcgctgcggaagatgcctgctttctcgcgaccaatactttcgcgatctggacccagccagtcggtatgatccagcgcaatactggttactaccgcgacatcggcgtcgacaatattggttgcgtccagacgaccgcccagccctacttccagaatcaccacgtcaagttgtgcctgcttgaacagccacaacgccgacagcgtaccgtactcgaaataggtcagggaaatatcaccgcgtgccgattcaatctccgcaaaagaggcggtgtgggccgattccggcaattcctggccctgcacacgtacgcgctcggtataacgcaccagatgaggcgaactgtagacgcccactttgtaccctgccgccatcagaatcgactccagcgtacggcaggtggtgcctttgccattcgtacccgcaacggtaaacacaaatggcgctggtttcaggacgccaagacgcgccgcgaccaggctcacgcgctcaaggccgagatcgatagttttactgtgcaggttttccagataagaaagccacgaagccagaggcgacgcggcttgaggagtgcgtttgataatcatggtatccgctgattcgttacggtgagaatagcaaaagggcagagccagtggccctgcccttatcagttatcaggcctcaggttcctgatccggtaccgggggtaccactacgccttcacgcggcgcttcaggattcggcgctggcagattcatcaacttcgccagaatgctcgccagtttcaggcgcatttccggacgacggacgatcatgtcgatcgcgcctttctcgatcaggaattcactgcgctggaatccaggcggcagtttttcgcgaacggtctgttcgataacacgcggaccggcaaagccgattaacgctttcggttcagcgatgttgagatcgcccagcatggcgaaacttgcagaaacaccgcccatcgtcgggtcggtcagcacggagatgtacggcaagccgcgctcctgcatttttgccagtgccgcagaggttttcgccatctgcatcagcgacatcagtgcttcctgcatacgtgcgccaccagaggcggagaagcagatcagcgggcagttatcttccagcgcctgctcaacggcacgcacgaaacgtgcacccacaacagaccccattgaaccgcccataaaggcgaactcgaatgccgcagcgacaaccggcattccatacagagtgcctttcatcaccaccagcgcatctttttcgccggtttctttctgcgcagatgccagacggtctttatacttcttggagtcacgaaacttcagcacatctttcggctcaagctcgctacccagctccacaaggcttccttcatctaacaggctatgcaggcgattacgcgctgtcatacgcatgtgatggtcacacttcggacagacctcaagattacgttccagctcagcgcggtataaaacctgaccgcagctatcacacttagtccacaccccttcaggaatgctcgccttgcgggtgggagtaatgttgcttttaattcgttcaatccagctcattagggacctttctgtctgaacctggttcgatgccagttttatctttggggacgcataatgccatttttgcccccaacagaccatgaatgttgcacattaaaacataacagcccgaaactttggataaaaaagtggtcgaaccgcggagttactttttattttgcggcgcgtgccgcagcgcgtttgtgacggattatttcgatgacgcccggcaaaatagaaaccacaataatcccgacgatcagcagcttaaggttatcctgaaccatcgggattgtaccgaagaaatagcctgcgtaggtaaaaagcagtacccacaacagtgcgccgatcacgttataagcggcgaaatgacggtacgacatgtggcccattcccgcaacaaacggggcgaacgttctgacgatcggcacaaaacgggcgagaataatcgttttgccgccatgtttctcataaaactgatgggttttgtcgagataactgcgacggaaaattttcgaattgggattactgaacaacttttcaccgaacaaccgcccgatagtgtaattgaccgcgtcacccacaatcgcggcgatcagcatcagcaccaccatcatatggacgttgagatcgttggtttccagtgatgccaacgctccggcaacaaacagcaatgaatcacccggtaaaaacggcgttaccaccagaccggtttcacagaacaaaattaagaacaaaatggcataaacccagacgccgtactccgcgaccagctctgccagatgcacgtcaatgtgcaggataaaatcgatgaggaaataaatcaggtccatatttgcctatgccttgtactcgtcatctttcaggctgtaactacgttggctacagcctgaaatgttccgagcattattctcgttagtccgccagaaatagcgggcccattggcggttttggaagatcataccggtcagggtaatccaccgcgaccagatacagcccttccgcttttgccgttgctgccgccagcgttctgtcctttgccgccagcaactctgctatccagctctccggctggttgtgggcaccgacttccatcaggctgccgacaatattcctgaccatatgatgtacaaaagcattcgctttaatatctaccaccacataaggaccgtgacgcgtgacattaatatgcataacgttgcgccacggggttcgggactggcactgcaccgcacggaacgaggtgaaatcattctcgcccagcaagcattgcgcagcccgatgcatccgttcagcgtccagcggttcgtaaaaatgggttacccctttactcagtaccgccgggcgcagccgatgattgtagatgatgtagcgataacggcgagccgtggcgctaaatcgggcatgaaaatcatcaggtacagttttaacccaacgcacagcgatgtcaccaggtaaattcgcatttacgcccaaggtccacgccgcgtctttgcgcagcgcggttgtttcgaaatgcacaacctgcccggtaccgtgtacccctgcgtcagtacgcccggcgcagaagacggtgatgggttcgttcgccacctgggagagcgccttttccagcttctcctgcacactgcggacttcgttctgccgttgccagccgtaatacttactgccgtcgtactcaatgcccagcgcaattttataaactggcggttgttgctggtcggacattagtacagatactcctgcaccagtttctcggcgatttttactgccatcagcgcgccgccaaagcgaacgttatcggccaccgaccagaactggacttgctccggcataccgtagtcattacgcacgcagccaacagaaagatgcggcgtacccgaagcatcacctacctgagttgggaattcgttctcttcagagagcacaatatcttcgccttgaacaaacgcatcacgcgcttcttctgctgccagtggacgcagagcttcaaagttgaccatctgggcatgaccgtagaataccggtgcctggacgacgctagccgaaatcatcagcccttcgtcctgcaggattttgcgtacttcgtcaacgatacgacgttcttcacgcacgctaccttcgctatccggcagtaacggcagcatgttgaacgccagctgacgcccgaagaaatcttcttcgtcaatcggaatgccgttgagcaatttcgcactctgccccgctaacgcatcgaccgcttttttgccctgggcggaggctgaaatcaggctggtaacgctgatacgtgataaaccgccctgatcgattaacggtttcagtgccgccagcagctggctggtcagactgtctggtacggcgatgacattccggttccggtaatctgtcagtacaaacgggtttacttccggcaccaccagcggtacgtcgggttcgagagcaaacaatccactgctgtcgatcaccaggcaacctgagttggtcgcttcttcaacccaggcagcggtagcttctttgcctgcgacaaaaaatgccagctgcgcctgcgtccagtcgaattcagcggcatcctgcacggtgattgtcttaccaccaaagcgcagttgttcgcctgcgctttcgttacgtgccagtgcataaatttccccaaccgggaactgacgttcagccagcgtttcaagcagggcttcgcccacagcgccagttgcgcccaggacggcaatgttccagccttcagacatggtggtttactccagaaatagcaaagctccctgccaatgttacagcagagagcatgaagaagagattaacgtgccggatgatgaacggcgttaaaacccagtttacacagcaatgatgccgcactggcgtcatcacaaattacatacagagatgaccattcacggcgctcaagatagtttttgcgcagtttatcgaactcacccggtatcccggcgactttacgcagcggtgcgtcatcgcggcgcacatcatacaccaaatgcaccagccttttcagcgtcggttgatcgagcgggccatgcagcgtaatgcgaccaaactctggcgcaggcagtaatgtatccagcgcaacgtgctgttcatgcccaataaacttgctataagcttcaaacacttgcgtagtaccgcgtgctttaccttccagggtatagcctgcgatatgcgacgtgccgatatccacttttttcagcagctcgacgttgagttccggttcgccttcccagacatccagcactacgcttaacttctggccttcattcaggcaggtcagcaacgcagtattatcgacgactgcgccacggcaggcgttaatcagaatcgctccgggcttcaggctacggatcagtttttcatccgccagatgtagcgttttgtacggaccatctttaaagagtggcgtatggaaagtcagaatatccgcgcgctggactaactcatccagcgagcggaaatcaccctcatccccacggtcggcgcgaggcggatcgcaaagtaaggttttaatccctaacgcttccagtcgcgcctgcaatcgacgtccaacgttaccaacgcccacgatccccaccgtacggtcgtacagtgaaaatccatcgcgttcggcaagcatcagcagggaggagaaaacatattccaccaccgcaatcgcattacagccaggtgcagcggaaaaaccaattcccgcctgcttcaaccatgcttcatcgacatggtcggtccccgcagtggcagtgccaacaaatttaatgggttttcctgccagcaaagattcattcactttcgtgaccgaacgcaccatcagcgcatccgcgtctgccagttgagcgacggggattggacgcccgggaaccgcggtcacctcacccaaacggctaaataagtcgcgggcataaggcatattttcatcaacaaggattttcacgtttgtgttacctgtatgagacgagagttaaccggacaagtgtgccataatctcgcggccaggcatacttgcgaagatttcaggtataaggatacgtaatgatacaacctatttccggccctcctcctgggcaaccaccaggtcagggagataatctgccgtctggcacgggcaatcagcctttatccagtcagcaacgtacttcgctggaaagcttaatgacgaaagtgacctcactgacgcaacagcaaagagcagaactgtgggcgggtatcaggcacgatattggtctgtcgggagattcaccgctgctttcgcgtcacttccctgccgctgagcataatctggcgcaacgtctgctggccgcgcaaaaaagccattctgcccgccagcttttagcgcaattaggggagtatttacgtctggggaataatcgtcaggcggtcacggattatatccgtcataactttggtcagacgccgctgaatcagctctcaccggagcaattaaaaaccattctcaccctgttgcaggaagggaagatggttattccgcaaccacagcagcgcgaggcgaccgaccgtcctttattaccggcggagcacaatgcgctaaaacagctggtgaccaaacttgcggcggcaacgggggaacccagcaaacagatctggcaatcgatgctggaactttccggggtgaaagatggcgagttaattccagcgaaactgtttaaccatctggtgacctggctacaggcgcgtcagacgctaagccagcaaaatacgccgacgctggaatcactacagatgacgctaaaacaacctttagatgccagtgaactggcggcgttatcggcatatatccagcaaaaatatggtctttctgcgcaatcatcgctttcttctgcccaggccgaggatattcttaatcagctttatcaacggcgggttaaagggattgatccgcgtgttatgcaaccgctgcttaatccttttccaccgatgatggacacgttgcaaaatatggcaacgcgtcccgcgctgtggatactgttagtcgcgattatcctgatgctggtctggctggttcgttaaccccgacgaaatgacagtatcgtgacaataatacccagcaccgcagagatcgccccggcaagaaataccgaagagtaaccaaacgtggtcgccagcattcccgccagcggcccggagacgccgagggcgatatcctgaaacgcggcgtaaccgcccagtgcggtgccgcgaacttgtgaggggacgcgtttaaccacctccacgcccagcgcaggaaagataagcgaacatccggctccggttaacgccgcgcccgctaatgcgacccatgcacctggggcttgccagagcagcaacaagcccaccgtttctacaagcagagagacaatcgccactttcacgccgccaaaacggtccggcatccagccaaacatgacgcgcatcacgacaaatgcgccgccaaacgcggtaagagtaaagcccgccatcgcccatcctttgctggcaaagtagagcgaaacgaaagtcccgataacagcaaaaccaacgccttgtagtgccagacctaaccctggtttccagataagcccgacaacgctccacagcgatggacgttctcccgccagggccggtactttgcgcactgtgccgttacaggcccacgccagtacgggtaataccattgtggtgatcgccagtgcggcaaaaccgtaatggctatgaatcaacaggccaagcggagcaccaacagcgagggcaccgtaaatcgccattccgttccatgacatcactttgccagagtgttttggccctacgatgcctagtccccaggtcagagcgcctgtcagtaactggctttcaccaaagccaagaatcaaacgcccgacgaccaacagagcaaatttgaacggtgcggagacaggcaaaatcgccgccagcagcaacgcgccgccagccagaccacaagctaacattccctgaagcgccgaacgttttgcaccatattgatcggccagtcgcccggcgtaaccacgcgtcagcaccgtagccagaaactgaatcccgacggcaatgccgaccatggtattgccatagcccagttcatgatgaacaaacagcgggataaccggcaacggcaaccctacggtcatgtaggtgagaaaaaccgcaaaagcgatgcggaagagcgaaaaattggcagaagatcgtgtttcggtttggcttacagcagtcatgcattactccagaatgcagcgcaaggcgaggagtatccccgtctcatctctctggtttcagggttacggtgcgttggcaggatttaacgcgtacgtcttttcagaaggaaatcgacaaagcgggaagtttgcctggaactggcggcgattgtcaatgatgtgaaaaagggaaccatcaggttcccttttgcgttagtgccggaggccgcattggcgcgtaacgtcggatgcgacgctggcgcgtctactccgacctactgcgaattaatctttcagcttgcgcattaccagcgtggcgttggtgccgccgaagccgaagctgttagacataacggtggtcagttcgcgatcggtcgtttcggtcacgatgttcagacccgcagcctgctcgtccagctcttcaatgttgatgctcggggcgataaagccgtgttccagcatcagcagagagtagatagcttcctgtacgccagcagcgcccagagagtgaccggtcatggctttggttgcagaaatcgccgggctcttatcgccgaacacttcacggatagctgccagctctttcacgtcgccaaccggagtcgaagtaccgtgggagttcaggtaatcgattggggtatcaacgccatgcatcgccatcttcatgcagcgtactgcgccttcgccagacggagcaaccatgtctgcaccatcagaggttgcgccgtagccaacgatttcagcatagatgtgagcaccacgcgccagcgcgtgttccagctcttcaaccactaccataccgccgccgccagcgataacgaaaccgtcacggtgagcgtcgtaagtacgggaggctttttccggggtgtcgttgtatttagtagacagcgcacccattgcgtcgaattcgcaagccatttcccagcacagctcttcgccgccgccagcaaacacgatgtcctgtttgcccagttggatctgctctactgcgttaccgatacagtgtgcggaagtcgcacacgcggagctgatggagtagttaacgccatgaattttaaacggggtggcgaggcaggcagaaacgccggatgccatcgctttggtgaccacatacgggccaaccgctttcaggccgcgcgggccgcgcattgcgtcagcgccgaacacctggaaacgcggggagccgccgccggaacctgcaatcaggccaacgcgcgggttattctggtaagcttccggagagaggcccgcatcagcgattgcctgctccatagaaaggaatgcataaatggatgcgtcgctcataaagcgcacaactttgcggtcaatgaggccagtggtatccagttttacgttgccccagacgtggctacgcatgccggaatccttcagctcctgagagaaagtgatccctgaacgtccttcacgcagagatgccaggacttcctgctggttattaccgatgctggaaacaatgcccaggccagtaatcactgcacgtttcattcaatacctctgtaagtcgcacatagagtaagtttcgaatgcacaatagcgtacacttgtacgccgaacaagtccgatcagccatttaatagagaaatttgcgcagccttacacacatcgctaagatcgagccaccgcctgtaagacgagtaacttacgtgaaacactactccatacaacctgccaacctcgaatttaatgctgagggtacacctgtttcccgagattttgacgatgtctatttttccaacgataacgggctggaagagacgcgttatgtttttctgggaggcaaccaattagaggtacgctttcctgagcatccacatcctctgtttgtggtagcagagagcggcttcggcaccggattaaacttcctgacgctatggcaggcatttgatcagtttcgcgaagcgcatccgcaagcgcaattacaacgcttacatttcattagttttgagaaatttcccctcacccgtgcggatttagccttagcgcatcaacactggccggaactggctccgtgggcagaacaacttcaggcgcagtggccaatgcccttgcccggttgccatcgtttattgctcgatgaaggccgcgtgacgctggatttatggtttggcgatattaacgaactgaccagccaactggacgattcgctaaatcaaaaagtagatgcctggtttctggacggctttgcgccagcgaaaaacccggatatgtggacgcaaaatctgtttaacgccatggcaaggttggcgcgtccgggcggcacgctggcgacatttacgtctgccggttttgtccgccgcggtttgcaggacgccggattcacgatgcaaaaacgtaagggctttgggcgcaaacgggaaatgctttgcggggtgatggaacagacattaccgctcccctgctccgcgccgtggtttaaccgcacgggcagcagcaaacgggaagcggcgattatcggcggtggtattgccagcgcgttgttgtcgctggcgctattacggcgcggctggcaggtaacgctttattgcgcggatgaggcccccgcactgggtgcttccggcaatcgccagggggcgctgtatccgttattaagcaaacacgatgaggcgctaaaccgctttttctctaatgcgtttacttttgctcgtcggttttacgaccaattacccgttaaatttgatcatgactggtgcggcgtcacgcagttaggctgggatgagaaaagccagcataaaatcgcacagatgttgtcaatggatttacccgcagaactggctgtagccgttgaggcaaatgcggttgaacaaattacgggcgttgcgacaaattgcagcggcattacttatccgcaaggtggttggctgtgcccagcagaactgacccgtaatgtgctggaactggcgcaacagcagggtttgcagatttattatcaatatcagttacagaatttatcccgtaaggatgactgttggttgttgaattttgcaggagatcagcaagcaacacacagcgtagtggtactggcgaacgggcatcaaatcagccgattcagccaaacgtcgactctcccggtgtattcggttgccgggcaggtcagccatattccgacaacgccggaattggcagagctgaagcaggtgctgtgctatgacggttatctcacgccacaaaatccggcgaatcaacatcattgtattggtgccagttatcatcgcggcagcgaagatacggcgtacagtgaggacgatcagcagcagaatcgccagcggttgattgattgtttcccgcaggcacagtgggcaaaagaggttgatgtcagtgataaagaggcgcgctgcggtgtgcgttgtgccacccgcgatcatctgccaatggtaggcaatgttcccgattatgaggcaacactcgtggaatatgcgtcgttggcggagcagaaagatgaggcggtaagcgcgccggtttttgacgatctctttatgtttgcggctttaggttctcgcggtttgtgttctgccccgctgtgtgccgagattctggcggcgcagatgagcgacgaaccgattccgatggatgccagtacgctggcggcgttaaacccgaatcggttatgggtgcggaaattgttgaagggtaaagcggttaaggcggggtaatctgctctcgcagtgtttgccggatgcggcgtgaacgccttatccgacctacgtgtgacgtgtaggcctgataagacgcgataagcgtcgcatcaggcatgctgctccagacgccgcaacttactgctgtgacgcctgctgaaacaggttttcccacatatcggtcaccagcgcctggtcacgcggcgacaattcaccagcaccaatggctttttccagactctggctaacggtcgtatgcaccgcctgagcggagtggtcatcaccactttccagttctgcgatggctaatgtcaggtggccacgcaaatacccactggcaaacaactcatcatcactggcatggtcaaccataccgtcgattaatgccagaatgcgtgattcaaactccgcgatcatcttctttcctcattgtaaaacgtggcgctggcttcagttgagcgcttccggccacgggaactgttccgccgtaagttccggcgtgtgataataattttgtagtgctttaatgaagcgtgccggacgttccggaatgccatttgtcagataatccatcacctgcgcatgtactcgccgttgaaacaccacacgatccggttcgaaatccccttccagattgtcgcaactgacgttaaacggatatcccgccgccacacagaacaaccagtcgagcgcctgcggcttcacttcaacatcttcaaactggctttgcgtttgggcatcgcgtccgtccgggcaataccagtagccgaaatcaaccagctcacggcgcgctttcccggcaatacaccagtgcgaaatctcatgaattgcgctggcataaaagccatgagcaaagacgattcggttatacggtacttccgcatcagcaggaagatagatcggttcgtcgtcgcctttaatcagacgggtattaaaatcatcggcaaagcagctattaaaaatttcaatcaactgctcgtagtggtgtgtactgttcattagttcatccccaaccagtggaggatctcctgtccgtggctgtcgtaaagtaatttggcactcatcaccgccgagacgataacaatcatcgggcggatcagcttttgtcctttgctcaacaccagtcgtgaacccatgcgcgcgccgaggaactgccccaccagcatgacaaagcccgtcgcccaaatcactttgccgccgagaataaacagcagtaaaccgccgatgtttgacgttgcgttgagtaatttggcgtgagccgtggctttggcgaggttaaatccgcacagcgtaacgaaggccagcgcgtaaaacgacccggcagccgggccaaagaatccatcataaaaaccgacgcagccaccggctattaacgcgaagggtaaaccgtacatccggcgctggcggtcttcttcacctagctttggcatcagcaagaaatagaggccgatacaaattaccagaatgggcaaaatctgccgtaagacatcagcctgaacgtattgcaccagcagtgcgccgctcattgagccgacaaaggtcatggcgatattgagtttctgatcgcttaaactaaccactttgcggcgaataaagtagatagtagcggaaatagagccgccgcaggcttgcagtttattggttgccagcgcattagcgggagacatccccgctgccatcaatgccggaatggtgagtaacccaccgccaccggcaatcgagtcgataaatcccgccagcatggcgacaaaaaagagaactcccagcaacagcggggaaaccataaacaggctattaaacgtttccattagatcacgtgctcatccagtagcgcctggcaggaaggcggcaacggaggcggtgtcttcttctcaggctttgttgttcccggttttggaggttcaaaccagctttgcagttctgccccgcaaccatcgcctgatggcggtaaaggttgatcttcacactccagactatcggcagggcaacgtaatcgtacatgcatatgcgcgcgatgctggaaccagggtcgcactttgcgcaaccagtcgcgatcggtgcccgcatcaaggcaaagttgttgtttaatcgccggattaacaaaaatgcgcgtgacgtctttgtcctgggcggcgagtttgatcaagctgaaaatttctggcttccacagcgtggagacaacgtgtttaccgtcgcgggaaactaagtccagtgcttgcgggcgcaagagctgcgcggaggtccagcgagttttcggcagttgcagaaagatatcgacatccagtccggtctggtggctggcatgaccgccgttgaaacgcccaccagcgggcatccccatatcgccaatcagcaccgtacccatgcccagattgctcacctggctactcagacgctggataaacatcaccagatccgggtgaccgaaatagcgacgctgatcggtacgcatgacctgataatgttcggactgtatcggcagcgtgtcagcgccgacaatacagccattagaaaaactgcctatcgattgtgcgctacccggcacaggttgggttattttttgccacggcgtcgctgccaggctggcgctactggcaagcagagccagcagcgcaatcgcggttttattcattttttaccagcgtggaatatcagtcttcacatcggcattttgcgcccgttgccgtaacaggtgatccattaaaacgatcgccagcatcgcttctgcgatcggcactgcgcggatcccgacacagggatcgtgacggcctttggtgatcatctcaacttcttcgccaaagcggttaatggtacgacccggcacggtaatgctggaggtcggtttcagcgccatatgggcaatgatttgctgcccgctgctgataccgccgagaatgccgcccgcatggttgctctggaaaccgtctttggtgatttcatcgcggttctggctgccgcgcagcgccaccacgtcaaagccgtcgccaatttccacgcctttcaccgcgttgatgctcatcagcgcatgggcgatgtcagcatccaggcggtcaaagaccggctcgccaagtccggcaggaacgccactggcaacaacggtgactttagcgccgatggagtcgccctcttttttcagcgcacgcatcaactcgtctaacgcgtcgattttgtcggggtccgggcaaaaaaacggattttgctcgacctgcgaccagtctttgatatccagcggaatgtcgcccatctgggtcaggcagccacggatttcaataccaaatttctcggcgagatattttttggcaatagctcctgccgccacgcgcatggcggtttcgcgggcggaagaacgtccaccgccgcgataatcgcgcagaccgtatttttgttcgtaggtgtaatcggcatggcctggacggaaaacgtccttaatcgcactgtaatcctgagagcgctggtcagtgttttcgatcaacaagccaatgctggtgccggtagtaacgccttcaaaaacaccggagagaattttgacctgatccggctcgcggcgctgggtggtatagcgcgatgtcccagggcgacgacggtcgaggtcatgttgcaggtccgcttccgtcagcggaatgcctggcggaacaccatcgacgatgcagccgagcgccagcccgtgcgattcgccgaaggtggttacgcgaaagagttgtccaattgtgtttccagccatcacggctccgttattgttgtgtttgcgtgtttacttaatctttataaatcgcgaaatgttctcgtgcggcaataagctgctctttggtgagcataaacacaccatcgccgccgttatcaaactccagccaggtgaacggaacatccggatattgttccataagatgtaccatgctgttgccgacttcacaaatcaacacgccatcatcagcaaggtaatctgccgcgttaccgagaatgcgacgcgtcagtttcaggccgtcagtgccagatgccaggcccagttccggctcgtggcggtattcgtttggcaggtcggacatatcttccgcatcgacatacggcgggttagtgacaatcaggtcgtactgcactttcggcaagtcgcggaacagatcggaacgaatcggaatgacgttgtggatcagaccgtgttcttcgatgttctgttcagcaaccgccagcgcgtctggagagatatccaccgcgtcgacttctgcatccgggaaggcataagcacaggcaatggcgatgcagccgctaccagtacacatatctaaaatatgctgcggttgcttgctgataagtccggcaaatttattgttgatcagttcaccaatcggcgagcgcggcaccagcacgcgttcatcgacgtaaaattcatggccgcagaaccacgctttgttggtcaggtaagccaccggaatgcgttcattgacgcggcggatcacgcgttcaacaatacggtgtttttcgctggaggtcagacgcgcggtgcgcatatcttccggaatatccagcggcaggtagagcgaaggcaacaccagctgtacggcttcatcccacgggttatcggtaccgtgaccgtaccagatatttgccgcgctgaagcggctcaccgaccagcgcaacatgtcctgaatggtttgcagctcatttactgcttcatcaacgaaaattttatccacgtattcctccagggcatgatcgcaataatttcggcggctagtttgccatgaagatgacgataaatcagcattcacgcgcggtgagtgaggaaaaatacgtttaaaacgatcgattgcgctacgagtcgggtaaactgtaggaaaattagaaatagagacagataaatgaaaaagaaaacaacacttagcgaggaggaccaggctctgtttcgccagttgatggcggggactcgcaagattaagcaggacacgattgtccaccgaccgcagcgtaaaaaaatcagcgaagtgccggtgaaacgcttgatccaggagcaggctgatgccagccattatttctccgatgagtttcagccgttattaaataccgaaggtccggtgaaatatgttcgcccggatgtcagccattttgaggcgaagaaactgcgccgtggcgattattcgccggagttgtttttggatttacacggtctgacgcagctgcaggccaagcaggaactgggggcgttgattgccgcctgccgccgtgaacatgtgttttgcgcctgcgtgatgcatgggcacgggaagcatattttgaagcaacaaacaccgctgtggctggcacaacatccgcatgtgatggcctttcatcaggcaccaaaagagtatggcggtgatgcggcgttgttggtgttgattgaagtcgaagagtggctgccgccggagttgccctgaggagttgagcgcgttgcgccaggtacgggtaatggcaggggcgaatgcccctgcctggtgtatctaagggctacaactcattcagtatgtactggaaccggcaagtagaatcgattggctgcatactgctggtatcaacacgcacgaccatatcgtgtaactgtttgtccgttatagggtgtcgatttggcgtgaccgagacttccgccttgtcacatcccgacgcggtaaaagttatcatctgtgcaacccagcggcagtaaccacctgtttcattcatctgcgtactgtcgcacaacttcccatctttcatcaaatacgttgaaagcgttttctcaaccacaccgcccgtcgactgcagggtgagcagttttgacttactgacataattctcattccatgaaacgtcataaggttgaacagaaacggatggacaaatcgtgtcgtgactatcaggcccctgatacgtcacgccccctggagaggcttcagagtcattcataataaccaaccatggacaagaaaagtaagattcaatctctgcagagacaataacctcaaatgtataatacccgcagttccacccagacggtaatccaggacaacttgctttgttgatattttgatggtagccaatcagcttaaccgaaggggcaggaggaggaccactccagctcacattttgcaatatttccccagtcatgagccattgactacttttatattcaccaacgtacactgcggatggcatcattatttttaaattaaaagtcgcaatattacgcgaatcaccgttgtaaccgtagtaaacgtcaacgctatgcccggcagccatagcttctgtagtagcaataagcatgaccagagcgaacaaccatcgtagtattttcattttaaatatactcaaatgtcgcagttaaagaggcggtaaattcaccgatcgtcacatcacggccgcttttcgcctgtagccaggctctgaaattgatatcgttattgccattggttagcgcaaaggtcgccccatttgtattgttgatggcaacctgcattccgtcggttttttccatgccaattcccactccctgagcggttgatgacgtatccagtgccagaaaaccgggttgttcgctgtcttctacccccgtgagcgtgacttttacgttgtatcccgccggccctttgcaatctttcagcttaaagactacgggtacacgagcggactggcctgcaacgttcaaatcctgacgactgaccgtgggaaagcgcacctctgccagatattggccatccaccaccagcgcacaggatttacttaataaattaccggagaaatgcagattattatctgccgcgaataacgtgctactcattgccaatatcagccccgctaacaggacgtaaccaccggactgaatcattgatttattcattgataatccacccgtaatgttgcgtaagccgaaaaattcgtatcgcttaacacagcatcactcgcttttaccggtacggcctccagcttcggcttttgcgtaaaatcagtggcgttgatagcaagcggagtattgagtttaaaacgctgaccatcgtgctgaagctcgataccaaaaccgggtacatcagtttcaattgctgcatcattaaaactggtttgtgtaccagtccaggtgagggtcatctcccaatctggatgacgggtcgtcgagtcacaagtgagttcatatggcacctctttacgaccatagttgccgttgatgtcgtcgataatgagatcgcgaaattcgacttcaatggttttaccaccgctgatgctacaggttggcggtgacaataatgtcccgtgaaaggtgatgtcttcatcagcagcatgagctatggcgctactgacacaaagcagggttaagaaagtctttctcattgatagtccaccaccatggtcaaactggcgttaaactcgcccgcagcaagttgcgccccgcttgccttcacaggtacagccttcaactgtggctggttattgatattaaatggcgtccagctattttcaccgacggcaaacaatgagttatcggcgctattttctatccgaatgcccagcccggtgatattggtactgagtaccgtttcgccgttaatcgttgaggtattgcccttaagttgcatccgcaagtcgttagcaagactgtttgtgcagttcaacgtgtatttcgcatcttgccgataattggtgccatcaacgttatcagcaatcatattgccgaactctacctggctgcccttgattgaacagggtggcggagcatcgaccaacacgcgcagaattaaatccacgggtttactaccagccatagcagataaactacagacactgcataccagcagccctgcgcccactacaaacttttgactcataactccccccgtcatcagcctttgcggctctgctcttcatccacctggcagctgttgccattgcactggaagaacagcggcatccgtgcgccaaagtcgttgacgtaagtcagcaccggtacgctatccattttcacattcagcggtaccgtggttttcggctcaatgaccagaggcgagaaccctgcagctggattaccgtttttctgcgcactggcgttgctgataatcacgtagtacggcgttgggttattgacggtaaatgcctgaccgctgcgggtgagcgtcaccttgtgctgccacggacttttcatactgaccttttccagcgcctttggtcgccagaacaacttgatacgcgtttgcagcgcgatttgcagggtattgggtttgtttgattttggcgggatctcgcgcacgttaaagtagaacatgctttcacgatcggctggcaatttgttgatatccggcattccctgcacttttacctgcccgttcatcattgaatcgatgcgttgcactggcggcagcacagttaacggcgaggtgatcttgttacccttttcatcttcaatccagctttgagccagataagggagtttcggatcgttattacgcagcgtcacgctgattgatttgtcgctttcattaaatatcaaacgggtacgatctggcgttacagacgccagggcagacaaactggtagcgctaagcagtaacgccagcgtcatagcacccaatttggcagagcaaagtaaatcagacatggatcattccttaatcacgttattggttagctgaaacagaaacagggggatcggtgggtgtcacctgttgcgtctgctcctgaatgacaggctttatgtcatcaggaacaaccggcgcgacgttgcctttatgctggcatggcagtaacaagccgttaaacagatcggcaggcagcgggtccggcaggttgatatcgcaatgcgcaacaccactccagaacacactcatatgttcgccaggtttcaccccagccagatagacactaccgtcatcatcgacaaggcccactgtctgctcgttatcattttttacttctgcgccaaacggtggatggctgccatcttgtaaacgcagcaccgccatcgctttttgaccactgatgacggcaaatttgcggtagccaatggctccttcagttagcgtggcttgcaccaccgactgggttgcttcggcgttttccggcaatttgttgaggtcgatatacgcctgattgcgataataattgttaacgtcagaaacgacggctttaccaaacatattggtataaacagcagccccgttaccttccaccggaacatcggcaacgccatcggcatcaatcagcaggcgtgtcccgcccatattctgggtacggtgaagtgcgccgccgtgggtagtaagcgttgcgccgccctgtaacgacaagcccgcagaggtgtattgcccttcatggtagttcgcactgaggtcaacctgcgccagcgaaccatcatggctgtagtagccatcaacgctggtgtgtttgtcactggtgccgatgttcaactgatagtgagtcgcgtcatcgacacggctaaaataaccgacctggctgctgtccgtcccactgccatagttgccgttatagctaacggtactgttgtcgccccacggcatactgagcgaaatctacatgcccttatccgcccggttgtcatactcgtagcggtagccagtcagggaaacgctcatattacgaatgctgcccatattgaaatagtgggagagcatgatgttgtagtttgtctgctcctcacgatcccagtaggtatggcgggtatagttgagataaaccgaaacacccgcatcgcggaagttctggttataagtggcggtgtacatctctttgtcgttgcccgtacggaccatttcgctgtcactggcatccagatactcgctcatggtcataaagttctcttccgagaagcgatatccagcgaaagtgacgcggctgttgagctggtcaaagtctttggaataactcacacggaaggagttaccgtccagcgaacctttgccataagcggtgtctttatccagtttggtatgcgaatgagtaacatcaaacgcgaccgcgccgaaggtagacaaatcgcgaccgacgcccagcgccgcagactgatagttttcatcacccagcgcaccgccatataacgaccagccgttagcgatgccccaggaggcttcagcaccagagaaaaatcccccctcgacatggtggccccactcttgcggacgtcccatcatgatcttatagcgaacctggcctgggcgagtgaggtatggcatcgaggcggtgctgatgtcatattcctgcacctggccgttctgttcttcaatgcgaatatgcaacgtaccggagacggaatcaccaagatcctgaatacgaaacggtccagccggaacctgcgtttcgtaaatcacacgccccatctggctgacggtcacttttgctgtggtgtgtgccacgccggaaatgtctggcgcgtagccgcgcagattgggaggcaacatttgatcgtcagtgctgacactgccaccaacataattaaaaccgtcgaaaatatcggaattgaggtaatcttcgcccagcgccagtttggcttttaatgacggtaacgcccgccaggcataatagcgactccactcccattttttttgtgtgtcatcgccgccaaattcatcgtcatcatcattactgcgcgtatgttgatagttggtctgccagtcagcgcgcatacgccatggccccaggttaaccccgaccgtcccgttgccgctgatctcgttactgtcatcgccgccattttcttcgtgtcgtgtttgcgcagtgatgctgtagtccgcaatgatcccggagatgccatcatcccaacgagaaggtggatcccagtcgggccaggtatattcgaggtaagcctgcggtagtgaaatgactaatgcggactggcttaaatcagccttaatttccacgccttccagttgaccgggcttcaggcatttaccatcgtggctccattgcagatttttcgccacgtcttcttttaaaccaaactgcgccaccagttccggtgtcagacaagcatagcttttgctaacgtcatcttcaccagcataccagtaaatatcgtactcttccgccaatggctgtttatttagttgaacctgtaaattgtattttccgggctcaacatacccctggctggaaaaacgcttcagatcaatttttgtgtcgccttttaattccagaaaacgggaatcaaactgaatgtcgtcttcagcccagacactgctataactccctgacattgccagcgcaatgcaccacggaagaatccgtaatcgaaaaagagaatggtcaggcatacacgtttttatccgtttttattcttgttcggtcaaaatccatttaaataccccatagcagtgtcgctatgggggtatgccttacaggtaagtaatctggaaggtggtatttgcttcgaaattacccagatctggcgcatcagctgcgccgaccagccaggctttaaagttcagagtctgcttcgctttgcctttattagtggcagtatctttcacgattttctggtcaatacccatgccgcttttgtaagaggtacccagagagtcaccgatcgccaggctaacattgttaaatgccgcaccggtatcggtattgaaaatggtgtaataattgccgctatttgcagaagaaacggtaccagtaaaggtagtggtcattgtttcctgagtatcaaatacgcaatcttgcaggcgaatctggaaatttttcggcgtggtggtgccgttatttttcagtttttcggcaccgatatcacccatatcaacttccagtttgtgatcgtccggaacgatagaacacactgagtcttcaatggtgccgtaaaaacgtgcagtaccgttgttacccgcagcgattgttgccgtagaggtgaacgcgcccatcaccattgccgcagcaatagctgttttaacaaacttactcattatttgtccttaaactataaataattaaaatataaacattgcaatacattgattcagtcaatagccaatgtttatacccagccattgaatacggcatgcgatccaaaaaaacaggtcgtaaaaaatgtattcgttggtgtggggtcgaatagtgatgttttcactcccctgattcaatttaattttactaatgagtaaatgtagatttaattaatatattgataggggaaagattatcttaaggatcttctaaaaaaacacgaaatatatatttagaaaaaacaggaagcatatcaacaatgaatgccaatagcttaaaaaacaaacaatgaacatataatgcgattggcattaacccgcttttgtcgatataatatataaacactatagccagaatttaatcaagtttcaattacgtcctgcctgattattcaactctattttctccattatctgtattaataaatgataatgagtgtcaaacagacattattcatttcaacatgtaactttgggcaaaatcaagatacgcgcagaagaatactttccgaatgaaagttaaaggtgttttatttatagatggggagagtcttcgatagtagtgaggttgacagatatccgctgcctgatgagcaattatgcccaatgaatctacctcattgggcataatttggaactcatcagatagcttttgccatcttcagattacacgggctcatctgccagttgaatgtgccgtttccgctttcatcaagcgttacgctggcaatggccgaggtggtaaacataggcggcgtttcgcccggacataactcggcaaccagatacccgactaacggtaagtgagagatcaccagtaccgaagcaacaccttcattggtcaacgcctgcaaataggcactgaccagaccaacatcgccgcagggcgttaactccggcagaacttctgcactggaaggcaggttcagacaatcccctacttcttccagtgtttgctcggctcgcaggaacgggctcaccagaacgcgttcgatttccactttttgacctttcagccagttcgccatcaggcgagattcgtcacaaccattagtggtcagaggacgaacggaatcactggcggcatcgagggctgcgtcgccgtgacgcatgataaaaacttgcatattgcaccgcttttgttaaccagattcgcccgttttctttcatctgaaaccagagaaagaaaacggtggccggcattgtgccttatccattcaccgaatgaaacgctgttttttacctcaatggcgtaagtatagtcaatatgcgtttacattttgaccaacactccgccattcagcgcggattcatatagctttgaccttcttattgcaggtcagttgcagttgttttccaaaaactttccccacgcgcgcccatctcgaccaaacgctcgcaaggggtaaaacgggaaccatactgcgtggcaagtcgttgcattattgcaaccacttcgcccgcgccgagagaatcgatatagcggaacggtccaccgagaaatggcggaaaaccaatgccaaataccgcgccaatatccccgtcacgcacgctacggataacctgctcatcaacacaacgtactgcttcattcagcatcaacatcacacaccgttcagcaacctgcggtgcggagattcgcccctgcccttgtgtgccaatcagcgggtaaatggcgggatcgacctgttttttgcttttacgccctttctgaccataaagatagaaaccccggccattttttctgcctttgcgatcgtcgttcaaaattgaagaaacaacatttgcaggcgcgctaaaacgttctccataagcggcttccagtacaggaataattttagtcccggtgtcgattcctacctcatccaaaagttggattgggcctaccggaaaaccaaatttcactagcgcggcatcaatgtgctctacccgttcaccttgggtcaacatgcggatagcttcattaatgtaaggcgctaagatgcgattgacgtaaaaaccggctttgtcacgcacgacaattggcgttttaccctgttttttcgccagttttactgtggtagcgatggtttgcgccgatgtccccgcatgaggaataatctccaccagcggcattttttccaccggactgaagaaatgcaggccgataacttgctcaggtcgcgtggcgtgagcggcgatatcaccaatcggtaaagatgacgtattcgaagcaaagatggtatgagcggcgcaattttgctcaacttccgccaccatctgttgtttcaattcgagattttcaaacaccgcttcaataatcagatcgcgatgggcaaagccgcgatagtccgtcgttccggagattaatgccagctgtttgtcacgttcgctggctttgagatgacgacggcgaactttgccctccagctgatcccaactgtacttcagcgcatgatttatgccctgcgggttgatatctttaattctgaccggaatccccgctttacaagcagtgacataagcaataccgccgcccatcaagccaccacctaaaatccccacgctgtttaatggcgcaggcggcgcatcactgccgggatctttcttcacgtccgtactggcaaaaaagatactacgcagcgcctgcgattgtggcgtcatcgccagttcgccaaacgcccgagcttcggcgtcataaccgctgctggtgccctgcgctaatcccgtttcaacaacctccaggatgcgttctgtcgccggataattgccttgagttttgtgttctgttttcttgccgaccattttgaacagcagcgcacgacctaacggccccgccagaatacgctcgcgtacaggtagagggcgggaagatgggcgctccttctttgccagctcaacagcggcttccagcagaatggagtgcggaacaacgtcatccaccagccccagctttaatgcctgtttcgcccgaagttgttttccggtgaggatcatctctaatgctgtgctgacgcctatcagacgcggtaaacgctgggtgccgcctgaaccgggtaacaatccaagttgtacttcaggcaaaccgagcaccgttttaggatcgtcagtacaaacgcgaccgtggcacgccagcgccaactccagcccaccacccaggcaagcgccatgaatagccgcgataacctgaatgggcaaagcatgaatctccgccatcaactgttggccctgccgcgccagagcttccgcttcttgcgccgttttgcagttgccgatcatgttgatgtctgcgccagcaatgaagttgtccggtttagcggagacaaacaccacgcctcgcaactctttgttttcacggagttgcttaataatggcgcgcacctgcgaggcaaactccgccttcagggtattcattttctcacccggtacgtcgatggtgataacggcaatgttgtccagacgaacattaagggtaaacgctgatgtcatttccattattccgcctccagaaccattgccgcgccaagcccaccggcagcacaggcggtaactaaaccaaatccaccgccgcgacggcgaagttcatgcaatgtctgggtaatcatccgcgcgccggtcgccgcgaagggatgcccgtaagcaatcgaaccgccaagcacgttaaatttgctatcgtccacttcgccagtggcatgtgcacgccccagtgcttcacgagcaaaacgttcactacccagcaactgaatattcgccagcgtctgagctgcaaaggcttcgtgcatatcgatcaatgtcagatcgctcatcgtcaaaccggcacgctccagcgccagcggtgttgaccaggctggaccgagcaacatgtcctgccagacatcaatcgcagtaaatgcgtagctgcgcagataccccagcggcaccagccctaattctttcgcccgggattcagtcatcaggatcaccgctgccgcgccatcggtcagcggcgtactgtttgccgccgttaccgttccgtgtttgcgatcaaacgccgggcgcagctttgcgtaatcggcaagcgaggaattaccgcgaatattgttgtcttcgacaagcggttgtttataaggagggataaaggcagtcatcacctcttctttgagttttccgtctgaccatgcctgagcggcacgctgatgcgaacggtgcgctaatgcatcttgctgttctcgggtgatgccgtaggttttcgccatttgctctgcggtgtcgcccatccgcaagccggtagaatattctgctaccgcaggtggtacgggcattaagtcgcgcaaacgcaggcgagagaagagtttcagtcgctggctcatggtacgagctttgttgacatcaaccagcacgcgcgccagttttttactgacgccaattggcaataccgaagaggaatctgccccaccggcaatccccgctcgaatagttcccgccatcaggctttctgcgacgtttgcaactgcctggaaactggtagcgcaagcgcggctgacgctgtaagcatcggtatgtacattcattcccgtaccgagaacaatttcacgcgcaatgttgggggcttcaggcatttgtacgacctgaccaaagaccagttgttcaatcacttcggcggggatctcgctgcgtgccagcagttcgcctaccaccatcttccctaaatcaaccgcgggaatgccatgaaaagccgtcgcctgacgggcaaaaggcgtacgtaaaccgctaacaatggcgatacgatcgccctggcgggtaaccagcggtaaaacctgacccataacactcccctgtaaaaaaataaataaagtggtctgacctgatcatagtcttaaccatttttttacatttagccaagtggagaaaagggaaagtgggagctatgacacagagagaaaagaagaagagaaaagaaaacgcccctgccagcaactgacaggggcgtacgtacccgagaggaattaacgcagacccagctggaaaatcagcatttcagcttcgcaggcaaaagtgaaatcgatatccaggcgcacaccgtcagactcttcagtgaaagtcggggtgattttgcaaggttcagattccacgctacgggctttttcagtcagcgccgccagcgtttgctctgcttctgcgcggtttgcaaacacgcggctgtaagacgcggtgcagtcggagttgtccataatggtgccaacatccatacagcagcaaaccggggtttcatcagcactacatttactcatcgttgatttcctctgtatgtgcacccaaggtgccagataaacgttgtggatattttacgcttccggaaagtgctgctccagttgttaattctgcaaaatcggataagtgaccgaaatcacacttaaaaatgatctaaaacaaaattcacccgaatccatgagtgcgccacctccaaattttgccagctggatcgcgtttcttagatcatatttgaaaaaagatagaaacatacttgcaacattccagctggtccgacctatactctcgccactggtctgatttctaagatgtacctcagaccctacacttcgcgctcctgttacagcacgtaacatagtttgtataaaaataaatcattgaggttatggtcatgagccagaaaaccctgtttacaaagtctgctctcgcagtcgcagtggcacttatctccacccaggcctggtcggcaggctttcagttaaacgaattttcttcctctggcctgggccgggcttattcaggggaaggcgcaattgccgatgatgcaggtaacgtcagccgtaaccccgcattgattactatgtttgaccgcccgacattttctgcgggtgcggtttatattgacccggatgtaaatatcagcggaacgtctccatctggtcgtagcctgaaagccgataacatcgcgcctacggcatgggttccgaacatgcactttgttgcaccgattaacgaccaatttggttggggcgcttctattacctctaactatggtctggctacagagtttaacgatacttatgcaggcggctctgtcgggggtacaaccgaccttgaaaccatgaacctgaacttaagcggtgcgtatcgcttaaataatgcatggagctttggtcttggtttcaacgccgtctacgctcgcgcgaaaattgaacgtttcgcaggcgatctggggcagttggttgctggccaaattatgcaatctcctgctggccaaactcagcaagggcaagcattggcagctaccgccaacggtattgacagtaataccaaaatcgctcatctgaacggtaaccagtggggctttggctggaacgccggaatcctgtatgaactggataaaaataaccgctatgcactgacctaccgttctgaagtgaaaattgacttcaaaggtaactacagcagcgatcttaatcgtgcgtttaataactacggtttgccaattcctaccgcgacaggtggcgcaacgcaatcgggttatctgacgctgaacctgcctgaaatgtgggaagtgtcaggttataaccgtgttgatccacagtgggcgattcactatagcctggcttacaccagctggagtcagttccagcagctgaaagcgacctcaaccagtggcgacacgctgttccagaaacatgaaggctttaaagatgcttaccgcatcgcgttgggtaccacttattactacgatgataactggaccttccgtaccggtatcgcctttgatgacagcccagttcctgcacagaatcgttctatctccattccggaccaggaccgtttctggctgagtgcaggtacgacttacgcatttaataaagatgcttcagtcgacgttggtgtttcttatatgcacggtcagagcgtgaaaattaacgaaggcccataccagttcgagtctgaaggtaaagcctggctgttcggtactaactttaactacgcgttctgataacgcgttcgcctggataaagtcacctgcatagcaggtgactttaactcccccacttcaccgaaagtagtgtcctcattgcttacctcctgagttttgcaaacagcctgttggcagcttgccctttcaaatcaataagcggtatccacagacaaacctgaagggaaaggcatattttcaggcgttctgctcgtccttctcaaagagtttacttttctgcatttccaggatactccccccccctggctattgtgcgctcatacactcaaattaaagataggttctaaataaatgagcgttttttgatagtctatttcattaggtaatatatatttgtaacaaatcaatcaaaatggaataaaatcatgctaccatctatttcaatcaacaataccagcgcagcttacccagaatccatcaatgaaaataacaatgatgaagttaatggattagtacaagagttcaaaaacctttttaatggtaaggaaggaataagcacctgtattaaacatctacttgagcttataaaaaacgccatacgagtaaacgacgatccttatagatttaatattaataattcctcagttacttatattgatattgactccaatgatacagaccatattactattggtatcgacaaccaagaaccaatagaattacctgcgaactataaagacaaagaactcgtccgtactatcattaatgacaacatagttgagaagactcatgatatcaataacaaggaaatgatcttcagcgcattaaaagaaatatatgatggagatcctggttttatcttcgataagatatcacacaaactcagacatacggtaacggaatttgatgagagcgggaaaagcgaaccaacggacttatttacctggtacggtaaagataaaaaaggcgactctctcgctattgtaattaaaaataaaaacggaaatgattacttatctctcggttactacgatcaggacgactaccacattcaaagaggaattcgtattaatggtgatagtctcacccaatattgtagtgaaaacgccaggagtgcttcagcgtggtttgaaagcagtaaagctatcatggcagaatcatttgcaactggttccgatcatcaggttgtaaacgagctcaacggggaaagactgagagaaccaaacgacgtttttaaacgttatggtcgagcaataagatatgattttcaagtggacgatgcaaaatataaatgcgaccatctaaaagaaatagtttctactttagtcggtaacaaaattaacgttggccattctcaaaaaatatataagcattttaaggatctcgaaggtaaaattgaagaaaggcttcaaaatcgccaggctgaatatcaaaatgaaattaatcaaccatctgcgccaggtgttaattttgatgatatttaaaattatttttccagttttttgatttttcaacagctgaatatcggaaatagtcagtgacgaacatcagtatttttacataattacgtctaggtcattgtcggtttatctccttttacttgtggtaattgagggataacaacaaaaaaggtgagttttgcgactcaccttttttatttgtttcttattcagaatcaatatcttttaaatcatcctgaatcgcttgtgcgttcggattttcctgcggtttgagttcgccgccattagcgatgaaatcatgacgctggaagtacgcttcgcgcaccataatataaggatcggacgactgacgcagcagaccatcggaatccagcagctgagcgcgggtttcgatcccttcaagcgtccatttacccacagacatcggccaggtcagccaggaaagaaccgggtaaaaaccatccgccatatcaccaccgtcatcacgcagcgtgaagctaccgtagaacggtaactgaacgtaaggcccataacccacgccataatgaccaagcgtactaccgaagcggtgaggttcagtccgttgcagtttcgggttcgccatccctgcaacatcaataaaaccgcccatccccaaaatggtgttcaggaaaaagcgggtaaagtggaccatcccctgataagggtcgccctgcaagaagtagttaaccatcaccgcaggttcttcaaggttgccagtaaagttgctcaaaccgttacgcgccggttgcggaacataatcacgccaggcgacagcgaccggtcgaacaatatacgggtctaatacattgaagttgaagttgtacatggtgcggttgaacccttctaacgggtcagaacgcccttgctgatctgtaccggaactcgcacaccccaccagaagcgtagttcccagagcaagcgccgacaggcgaagcttcataaatgtctccctgtttttttatggcttatgcagtttgccatccatgacggaacgataccgtatccgcctgtttaggtgtgggcgattgtaacagcacgtcaactgatgtccagacgccctgatttgctgatttgatcatagcctggtaatcgccgccctgtaggctacttgattctatagaaacagaaaaaggcaaacgcagccttttctacattttcagagtaactcccgtcagttgcgagcaaaaaagccgctacgctttagctatacgtgctaattcaagagaagagaccatggacaacgacaaaattgatcaacacagcgacgaaattgaagttgagagcgaagaaaaagagcgcggcaaaaaaatagaaatagatgaagaccgactcccctcccgggcgatggcaattcatgagcatatccgccaggatggtgaaaaagagctggaacgcgacgcaatggcgctactgtggtcagccattgcggcgggtctgtcgatgggcgcttcgttactggcaaaagggatatttcaagtcgaactggaaggtgtgccgggcagcttcttgctggagaatctcggttatacctttggttttattatcgtcattatggcccgccagcaattatttaccgaaaataccgtgactgcggtactacccgtcatgcaaaaaccgacaatgagcaacgtcggcttacttatacggttatggggcgtcgtgctgctgggtaatattctcgggacaggtattgcggcgtgggcatttgaatatatgcctatcttcaatgaagaaactcgcgatgcatttgtcaaaatcggcatggatgtgatgaagaacacccccagcgagatgtttgccaacgcgatcatttccggctggctgatcgccactatggtttggatgtttcctgcagcgggtgcggcaaagattgtggtgattatattgatgacctggcttattgccctgggtgacaccacccatatcgtggtcggttctgttgaaatcctctatctggtgtttaacggtacgctgcactggagcgatttcatctggcccttcgcactacctactttagcggggaacatctgcggcggcacctttatcttcgcgttaatgagtcatgcacagattcgtaacgacatgagcaataagcgtaaagcagaagcacgccaaaaagcagaacgtgcggaaaacattaagaaaaattataaaaacccggcataaatggcgagggtttaagcaatcgagcggcagcgtacttaccccgcactccattagcgggtatactcatgccgcattgtcctcttagttaaatggatataacgagcccctcctaagggctaattgcaggttcgattcctgcaggggacaccatttatcagttcgctcccatccgtaccagtccgcaaaatcccctgaatatcaagcattccgtagatttacagttcgtcatggttcgcttcagatcgttgacagccgcactccatgacgggtaaaaagtggataaaataattttacccaccggatttttacccatgctcaccgttaagcagattgaagcagcaaagccgaaagaaaaaccataccgccttctcgatggtaatggcctgtacctttatgtccctgtgtcagggaaaaaggtatggcagcttcgctacaagattgacggtaaggagaaaatcctgaccgtcggaaaatatccgcttatgactttgcaggaggcaagggataaagcatggactgcgaggaaagacatctcggttggcatcgatcctgtaaaggcgaaaaaggcttcgtctaacaacaattcctttagtgcgatttacaaggaatggtacgagcacaagaagcaagtatggtcagtagggtatgcaactgaacttgccaaaatgtttgacgacgacattttacctatcattggcggccttgaaattcaggatattgagccgatgcaactgctggaagtaatccgcaggtttgaagatcgcggtgcaatggaacgagccaacaaagcacgcagaagatgcggcgaggttttccgttacgctattgtcaccggaagggctaaatataacccggcacctgaccttgctgacgccatgaagggataccgcaagaagaacttcccgtttcttcctgcagaccagatcccggcattcaacaaagcactggcaacattttcaggaagtatcgtatcgctcattgcgaccaaagttttacgctacacagccctaagaacgaaagagcttcgttccatgctatggaagaacgtcgattttgaaaataggattatcaccatcgacgccagtgtgatgaaaggacgcaaaattcatgtggttcctatgtcagaccaggtagttgaacttctcactacgctaagctccatcaccaaaccagtctcagagtttgtttttgccgggcgcaacgataagaagaagccaatctgcgagaacgcggtactgcttgtgatcaaacaaatcggctatgagggtctggaaagcggtcacggattcaggcatgaattcagcacgattatgaacgagcacgaatggcctgctgacgctattgaagtgcaactggcacatgcaaacggcggatctgtgcgtgggatttacaaccatgctcagtatctcgataaacgcagagaaatgatgcaatggtgggcggactggcttgatgagaaggtggagtgagcgaccttaacaactatcgaatagcacaaagtcttgcaatccagtgcaaagctttgtgtgtataagttttgtctcatcaaccacagcaagtatcgatcgattaagacttggatgatagacttcattcctttgattattagctgatagaagaaatgttaaagctatttgcaaagtacacctctattggtgtgctgaacacccttatacactgggtggtttttggtgtttgtatctatgtcgcgcatacaaaccaagctcttgcaaacttcgcaggtttcgttgtggctgtgagctttagcttcttcgcgaatgcaaaattcacattcaaggcatcgactacaacgatgcgctacatgctatatgttgggttcatggggacactgagtgctactgttggatgggctgctgatagatgcgcacttcccccgatgataactcttgtcaccttctccgccatcagcctggtgtgcggtttcgtctattcaaagttcattgtctttagggatgcgaaatgaagatatctcttgtagttcctgtcttcaatgaagaagaagcgataccaattttttataaaacggtacgtgaattcgaagaattgaagtcatatgaagtggaaatcgttttcataaatgacggcagcaaagacgctacggagtcaatcattaatgctctggctgtttcagatcctctagttgttccgctgtcatttacacgcaactttggtaaagaaccagcattgtttgcagggttagaccatgcaaccggggatgcgataatcccaattgatgttgacctgcaagacccgattgaggttattcctcatcttattgaaaaatggcaagcaggtgctgatatggttcttgctaaaagatctgaccgctcaactgatggacgcctgaagcgaaaaacggctgagtggttctataagctccacaataaaataagcaatcctaaaattgaagagaatgttggtgatttcaggctgatgagccgtgatgttgtcgaaaatattaaacttatgccagaacgaaaccttttcatgaaaggtattctgagctgggtaggaggaaagacagatattgttgaatacgtgcgagcggaaagaattgctggagatacaaaatttaatggatggaaactttggaatttagcacttgagggtattacaagcttttccacattccctcttcgcatctggacatacatagggttagtggtagccagtgtagcatttatttatggggcgtggatgattttagatactatcatatttggaaatgctgttaggggatatccttcactacttgtttcaatactgtttttaggtggaattcagatgattggaataggagtattaggtgaatatattggacgcacatacattgaaaccaaaaaacgcccgaaatacatcatcaagagagtcaaaaaatgaataaagcaataaaagtatcattgtatatatcttttgttttgattatttgcgccttatctaaaaacataatgatgttaaatacatctgatttcggaagagccattaagccattaattgaagacataccagcatttacatatgacttacctttattgtataaattgaaaggtcatattgattcaattgatagctatgagtatataagttcatatagttatattttgtatacatacgtcctgtttattagcatttttactgaatatcttgatgctagggtgttatcgttatttctaaaagtaatatatatttattcattatatgcgatatttacttcatatataaaaacagaaaggtatgtaactttatttacattctttattttagcttttcttatgtgttcttcatcaacactgtcaatgtttgcatcattctatcaagagcaaatagttataattttccttccatttttggtgtattcattaacatgcaaaaacaataaatctatgcttttgctatttttttcgttgctaataatatctactgctaaaaatcaatttatattaaccccactaatagtgtattcatattatattttttttgatagacacaaactaattattaaatctgtaatatgcgtggtgtgcttgcttgcgtcaatatttgcaatatcttattcaaaaggtgttgttgaattaaataagtaccatgcaacatacttcggtagttatctttatatgaaaaacaacgggtataaaatgccatcgtatgttgatgataagtgtgttgggttagatgcctggggtaataaattcgacatatcatttggcgcaaccccaacagaagttggaacggaatgtttcgaatctcataaagatgaaacgttttcgaatgcactctttttattggttagcaaaccaagcaccatcttcaaacttccatttgatgatggtgtgatgtctcagtataaagaaaattatttccatgtatataaaaaactacacgtaatatatggagaatcaaacatactaacgactattactaacataaaagacaatatatttaaaaacattagatttatatcattgttattattttttattgcttctatttttattagaaataataaaataaaggcatctttatttgtagtatctctttttggaatatctcaattttatgtgtcatttttcggggaaggatatagagatttaagcaagcatttatttggaatgtatttttcgttcgacctttgcttatacataacagtcgtttttttaatttataaaataattcaaagaaatcaagacaatagcgatgtaaagcactaagtttaaattgcgcgccaatcatggcgcgcacaagctataataccaacctaatttctcctcctcttagagtgactatatctcctgatagaattgcggtattgactatcaaatgccctgattcgttgtttattgtaatatctcctctatctgcagacgataacttaaatgcatcattgcccacaacaaaccccctccagaaccaagtgctgatattatcatcaacagtgatagatacatatactaactgattatcgttataagtgattcctgtcttatacttaacataaggacttccactttgattctcgatagacacataacatccaggggttatgtttgtatgcgtcccgcgactatcgccccattaacgccatacgataaatgggatggtgagaaatgggtgacggataccgaggcacagcatagcgtcgcagtagatgcagcagaagcacagcgccagtcgctgattgatactgcaatggcttccattagtctgattcaactgaaattacaggctgggcggaagctgatgcaggcagagacctcccgacttaacactgtgctggattacattgacgcggtgacggcaacagataccagcaccgcgccggatgtcatctggcctgaactgccggaggagtaggccattcaatatctggcgcactggaagtatcgaccagctccagtgcgtccagataatccagccacaaattatattgcgccagttcctcacctttcagacgaccaatagccgctttaccagcccattgtttactgttcatataatcgttggcctgattaatcaattgctgctttttcagttcggctgcagcaatctgttcctcatgtgttggtggtggaatttcagaccatgcaggaaaaccattttctccagcgatacggatttttcctttcggcggtaatccggaaaactcaatatacacttgctcatcaacttcaacagcatcatctggccatgagccagcttgcgtgtaatcctctttcatctccaagggatagaaagagtttgtagtcgcggaatatatgtaattcatttttcactccataaagttaaaagaaattaacaccctaatgcgaaaaatgaagcaccgataccgggtacgcctgctctggaaataaatttcaccgggtcctggttataaccggcacaagctatatagccaacatttgcactgccgggagtgtaatcctgagtcgcaaatacccgcagacatctattcggaaatgcaatcggaaaataggttactgtgtcctgagacgtcagcggaacatcaattggcccccattgaataattaaaccggatggcaatttttgatatccaggaactgaagcagaaagcataaaactacccatatcaggtatctgattcgcccctgtccctacatttcttttagccgcttctcccaaaccaaggttttcgagagccttttgcaccgtgccgtccaatttgatatcgccaaacggattcttgcggcttaacagcagcgcacgaagcgcggtaagcagctggtcatgccgccccttctccaggctggcaccggaggcctccacaacgctgcaaagctcctcctgcaacatgtcaaagtagtcatcatccagatcggtggcaggcgtgccggtctgggggttaccacgggtacgggggattaccaaaggcagcacctttaagctccgcaagacgttctgaccagtcatgcgccagcgcgttgtcttccgcagtgtaatacgcggcacatttggcgttatcaccatcagtaaacagatccagaacaaacgggccaaacagggtgttaattccccagaaaatgttgtccggcgtgcgccactgatcgcccacttccttcagttcatgggctggtttgttccgcagctccaccagcgcctggcaatatttattactcattaagcccccacgtaattccctgagagataccactcttcacctgatgcagcccgcttactgcttttccgtaaacaccgttcacgacgcgccagaaaattgtttcgttctggctgggagtggctttcacggaatgccgccatccacaccgttgcagcacgacggtataagcccctggactccagttcttccgcctggcgggtcaggcacaaaatcacccgcgggtcgttagtgccgacatagaaattgcgcacaggtctggtttcacgaactggttgtggttccggatcctgcgctctctcagtcaggcgcgggaaatgtctgtgtgtatctccttcacaacggtgagccacacgcccactctgacgtaacttgcttgctgactgcagaacgcgctgccgtgagtaacctgcaaaagcatccgcaatgtctccggaagtacagcccggatgggcttcaatgaatttctgaacgtcattcaaaagactcatgctcaccccctgaatcctgccgggatctggctgtagtccacattgtcgtaactggctttgaagtacgggtcttcgcgtttttctgtgtacgtgctgacggacggcgataagcgcagggaaagctcatcccatttttcccgcagcttcgacgggctgagcacgttacggcaccagaacggatcgcggctgacgcggctgtacatctcgcagatttgtttgtgagtacgaccatcctgcacacacatcaggcgaatttcgtttgcccaggctgtccagttcggttctttgggacgaaccacctcgccgtcacattcggcggcctgctcgtacagggcgatgatttttttccagagccactgtgcgcaggtcaaatcatcctgcgttccccactggcgctttttagggctgaatacaaccgcatcaggatggcgagttaaaaaatcctgttcatccgtctgcgtgtccggttgcgaagcgtccggacgagaaggttttttatctgacggatcatgttttgattttactgacggatccccgccagattctgacgggtgaaaacccgattttttgccagatttcgacgcatcaaattttgacgggtcagattttgatgcgtcagattttgacgggtcagagtctgacagttgagaaaatgccgctgcctgaagcttcgcaacgttaagctgataaacattcgacgcattgcggttatgatgaggagcagcaaaatggctagcgaacgcagtactgatgtgcaggcatttatcggggagctggacggcggcgtatttgaaaccaaaatcggcgcagttctcagtgaagtcgcttccggtgtgatgaacacgaaaaccaaaggtaaggtctcactcaacctggaaatcgaaccatttgatgagaaccgtctgaaaatcaaacacaaactctcatatgttcgcccgactaaccgtgggaaaatttccgaagaagacaccaccgaaacgccgatgtatgtcaatcgcggtggtcgcctgactattctgcaggaagaccagggacaattactgactcttgccggtgagcctgacggaaaactccgcgcagcaggtcattaatatcattcttaattaactaattatttatctcatcactgaatatcttaatatagtgaggacttattatgtctcagaacttagacgcaaccgcaattaatcaaatccatgcccttatttctgctcagggtgttaatgaaattatcagtaagattggtgccgatgctgtggcattgcctgagaatttccgcattcatgatctggaaaaatttaatttaaatcgcttccgtttccgtggtgcgctttccactgccagcatcgatgactttacccgttattctaaagatcttgcagatgaaggcacccgctgctttatcgatgctgataatatgcgtgccgtcagtgtgcttaacctgggtactattgatgaaccaggtcacgcagataacaccgccactctcaaactgaaaaagacagcaccgttctctgccctgttgtctgttaacggcgagcgtaactcccagaaatcactggcagaatggattgaagactgggccgactaccttgtgggctttgatgctaatggtgacgccattcaggcaacaaaagcggctgcggcaatccgtaaaatcacgattgaagcaaaccagaccgctgattttgaagataatgacttcagcggcaaacgctccctgatggaatctgtcgaagcgaagaccaaagacattatgccagtggcatttgaatttaaatgcgttccgtttgaaggtctgaaagaacgtccgtttaaattacgcctcagcattatcactggcgatcgtcctgtactggttctgcgcattattcagctggaagcggtgcaggaagatatggctaacgaatttcgtgatctgcttgttgagaaattcaaagacagcaaagtagaaacctttattggtactttcaccgcctgatttcattactgcaaatgcccctgcgggggcatttatggaaacgtaattaactcaataatcaccggatggtgagggcttccttttacccaaactcagcgcggtgcagcgcatatacgtggagaacaaaatgtcatttattaaaactttttccgggaagcatttttattatgacaagataaataaagacgacatcgtgattaacgatatcgcggtttccctttcaaatatctgccgctttgccggtcatctttctcacttctacagtgtcgcccaacatgcggtgctttgcagccagctggtgccgcaggaatttgcttttgaagcattaatgcatgatgcaacagaagcgtattgccaggacatccccgcaccactgaaacgccttcttcctgactataaacggatggaagaaaaaatagatgcagtaatccgtgagaaatacgggttacctcctgttatgagcacgccagtgaaatatgccgatctcattatgctggcaaccgaacgccgtgatctcgggcttgatgatggctctttctggcctgtactggaaggcatcccggcaacagagatgttcaacgtgattccactggcaccgggtcatgcctacgggatgtttatggaacgttttaacgatttatcggagttacgcaaatgcgcatgaatgttttcgaaatggaagggtttcttcgcgggaaatgtgtaccgcgagatctgaaagtgaacgaaacaaatgctgagtacctggtacgtaaattcgacgcgcttgaagctaaatgtgcggcactggaaaacaaaataataccagtgtcagctgaactgccaccagcaaatgaaagtgttctgttatttgatgctaacggagaaggctggctgattggctggcgttctctctggtacacctggggacaaaaagaaaccggagaatggcagtggacatttcaggttggggaccttgaaaacgtcaatatcactcactgggcagtaatgccaaaagcaccggaggctggagcataatgaccacatttaccaataaagaactgattaaagaaatcaaagaacgaatcagcagcctagaggttcgagacgatattgagcgccgtgcttatgaaatcgcactcgtatctctggaagtagagccagatgaacgcgaagcctatgaattattcatggaaaagcgtttcggtgacttagtagatcgtcggagagcaaaaaacggcgataacgaatacatggcatgggatatgactctcggttggatcatctggcagcaacgagctggtatccatttttcaacaatgtcacaacaagaggtgaaataatagagccatacagcctcacactcgatgaggcctgtcagtttcttaaaatatcctgatctaccatcgccgtcatagagcgtatttttattacctgatttgcaggttcgattccctattcggagatagcactcatgcaacacgaactacagcctgattcactggttgatttgaaattcatcatggctgatactggctttggtaaaaccttcatctatgaccggattaagtcaggcgacctgccaaaagccaaagttatccacgggcgagcaagatggttatatcgtgaccattgtgaattcaaaaataagctcttaagccgcgccaatgggtaaaatagcgggtaaaatatttctcacatctaaaaaacaccattccaatcaatcccctgctgcttcaagtagatgtctgcaggggacaccatccttgtgtttatccctaaaaccacataaaaaccgtaaattaaattcgaactagcaggccgaataaggcacaccaggaactcgtggttttattcattatgaagtggtttttacctgttctcttagccagataataaacgcttcaatttttggccactgcctgcccggtaatgtggtgatgtaataatgctgatggcatttcaccgtcatatcgccaaacggcgcgacgagctcaccactggcaagccttttttgtaccaggcgttttcttcccatcgccaccccaatatgattcatcgcggcaataacagctaaatcagaacgatcaaagccaattccagaagatgtcggcaaattaaccgcataatgttgcgcccaactatgccattcatccgtaccggagtcgttgctccatgcctgtctgtcatggagcaacgtacagtgacacaggttaattaccgtgttggttaaagcatgtctttgagcgtattccgggctacatactggcaggatttcttcatccatcagaaagtgatgagtgagttgcgctgacggcgcatcatcaaagtagatcgccaaatcgattccggcacgttgcagattgacgttgtcattaccagtgagcacggtgagcgaaatagacggataccggcgtgtaaagtcacctaatgcgggcaccaaccagcattgggcgatagagggccgggaatacagagttaacgttcccgataactcctgatttttgatatcaagaatttcctggttcagggtatccagcgacgattttagcgcccaataaacacgtttcccctcgtgcgttaattccactttgcgatgggaacgaacaaacaactgaatgcccaattcttcttccagctgattgatacggtgacttaccgcactggggctcagcgacaattcctctgccgccagggcgaaggactgatgcctggcagccacttcaaaagtatgcatttttgataattgccagccgttaagcagccgatttcttatttcacgaaggggttccataatcacctcatttttcgcttaagtgtaaaaaaatagcggcaaaatttcagctatgagatgagctaaagtgaaccatatctcaattcaccttcatttttagatgtaaatcactccattgatgcaatttacctcatgtgaaaggcaaattttatcgtttgtcagcctgcgttgtttttttgtccaatatcatcaggttaatcacaggggaaggtgagatatgcactctcaaatctgggttgtgagcacgctgcttatcagcatcgtgttaattgtactgaccatcgtgaagttcaaattccacccgtttctggcgctgttgctggccagcttcttcgtgggaacgatgatgggcatggggccactggatatggtaaatgctattgaaagtggaattggcggaacgctggggttcctcgcagcggttatcggccttggcacgatactgggaaaaatgatggaagtatccggggccgcagaaagaattggtctgacacttcaacgctgccgctggctttcagttgatgtcattatggtgctggttggcctgatttgtggcatcacgctgtttgttgaagtgggcgtcgtgctattgattcctctggctttttcaattgccaaaaaaaccaatacctcattattaaagcttgccattccgctatgtaccgcattgatggcagtgcactgcgtggttcctccacatccggctgctttatatgttgccaataagctgggcgcagatatcggttcggtgatcgtctacggtttgctggttgggctgatggcatcactgatcggtggcccacttttccttaaatttctgggtcaacgactgccctttaaacctgtacccacagagtttgcagatctcaaagttcgcgatgaaaaaacactaccgtcattaggcgcaacgttattcaccatactgctacccattgcgctgatgttggttaaaacgattgccgaattgaatatggcgcgtgagagtggtttgtatatcttggttgagtttattggcaaccctatcactgccatgtttatcgccgtgtttgtcgcctattatgtgttgggtatacgccagcatatgagcatggggacgatgctcacacatacggaaaatggcttcggttctattgctaatattttgctgattatcggggccggaggcgcattcaacgccattttaaaaagcagcagtctcgctgatacgctggcagttattctctccaatatgcatatgcacccgattcttctggcctggttagtggctcttattctgcatgcggcagtgggctccgctaccgtggcaatgatgggggcaacggcaattgttgcacccatgctgccgctgtatcccgacatcagcccggaaattattgcgattgctatcggttcaggtgcaattggctgcactatcgttacggactcgcttttctggctagtgaagcaatattgcggcgctacgctcaatgaaacatttaaatactatacgacagcgacatttatcgcttcagtcgtcgctctggcgggcacattcctgctgtcatttatcatctaagcgcaaagagacgtactatggaaaacgctaaaatgaactcgctcatcgcccagtatccgttggtaaaggatctggttgctcttaaagaaaccacctggtttaatcctggcacgacctcattggctgaaggtttaccttatgttggcctgaccgaacaggatgttcaggacgcccatgcgcgcttatcccgttttgcaccctatctggcaaaagcatttcctgaaactgctgccactggggggattattgaatcagaactggttgccattccagctatgcaaaaacggctggaaaaagaatatcagcaaccgatcagcgggcaactgttactgaaaaaagatagccatttgcccatttccggctccataaaagcacgcggcgggatttatgaagtcctggcacacgcagaaaaactggctctggaagcggggttgctgacgcttgatgatgactacagcaaactgctttctccggagtttaaacagttctttagccaatacagcattgctgtgggctcaaccggaaatctggggttatcaatcggcattatgagcgcccgcattggctttaaggtgacagttcatatgtctgctgatgcccgggcatggaaaaaagcgaaactgcgcagccatggcgttacggtcgtggaatatgagcaagattatggtgttgccgtcgaggaaggacgtaaagcagcgcagtctgacccgaactgtttctttattgatgacgaaaattcccgcacgttgttccttgggtattccgtcgctggccagcgtcttaaagcgcaatttgcccagcaaggccgtatcgtcgatgctgataaccctctgtttgtctatctgccgtgtggtgttggcggtggtcctggtggcgtcgcattcgggcttaaactggcgtttggcgatcatgttcactgcttttttgccgaaccaacgcactccccttgtatgttgttaggcgtccatacaggattacacgatcagatttctgttcaggatattggtatcgacaaccttaccgcagcggatggccttgcagttggtcgcgcatcaggctttgtcgggcgggcaatggagcgtctgctggatggcttctatacccttagcgatcaaaccatgtatgacatgcttggctggctggcgcaggaagaaggtattcgtcttgaaccttcggcactggcgggtatggccggacctcagcgcgtgtgtgcatcagtaagttaccaacagatgcacggtttcagcgcagaacaactgcgtaataccactcatctggtgtgggcgacgggaggtggaatggtgccggaagaagagatgaatcaatatctggcaaaaggccgttaataacgtttcaacgcagcatcgcaatcctttccctgggtgagcgatgctgccgatggcgcagacttaagatccccggtcttacccgctataaccccctccttttatcatcacccaacgcctttcgctgtaaacggcggtttcgcaaaccaaaccaaaaccgtaagtaagataaaagcaatagccgccatacggaaaatctcatttgcagaaatagaaagtgactgctgggttatttcattattaatttcattaagaactcctgaaagcgaaccataatatttatccataatttgtgacgatgaattaaacacggggttaaattgatcgatggttgctgtcaactgactatggtgtaacgattcgcgtcgtccccacagcgtcattgtcaacgacgtaccaactgatcctgacaaggtacgaaaaaaattactcatactcgaggcattggcaaatttattatctggcaagcctgaaaacgaaatcgttgttaagggtaaaaagaaacaggcaacggcgaatccctgaaaaaactgcggcaaaatgatgcctgtaaaatcaatcgttggcataaatgtcacagaacgccagtaatagcaaaccgcatacatcaaaaaactaaatgtcactaacaaccgcatgtctattttgttgccataacgtcctatcaaaggtgaaattaatagtggcatgatgccgatgggcgcataagcaagtccggcccatatcgcattataccccatcgtttcctggagtaactgcggcataaggacgatcgctccagagtaaaataaatacgcgcatgtgatactcacaataccaatggtgaagttacgggacttaaacaaactgagatcaagaatcgggttctctgaggtcgactcccaaatgactaaagagatcagagaaataactgatactactgttaatattattattgtactcgagttgaaccaatccagatcgcgccctttatcaagcataatttgcaagccaccaacaccgagcactaacagggtcagtcctggtagattcattttgaccggtgaagtctcagtttctcttcctttaagtaaggttaagcataatgtcaggacgataatccccatagggacattgattaaaaatatccaaccccagctaaagttatcacaaatataaccgcccaatatcggcccacatatcggagcgataatcacggtcattgaccataatgccagagcaaatgttcttttttctggcggataattccttaataataaactctgtgacagtggaattaacggccccgccattaacccctgaacgactctaaaaaatatcagcacatcaagattggtcgataggctacacattaatgaagacagcgaaaaaaaagtgactgaaagtaaaaataatcttaattcgcctattctttgtgccaacctgccagtaacagggatcgcaatggcatttgctacaccaaacgaggtgataacccaggtgccttcgtctgttgatgctcccagaaagccagatattgtcggtattgcgacgttagaaatagtggaatccaacatttgcataaatgtcgctaatgacaatgcaatagtgacgcaccataacgtcccaccggttaatggtgccggagttgatttagtgattgccattaaagttgtccattatgcgaaataatgttgctaatttctttttctatcggactggtatcgataactaaagccttactggtataagccggcatggaggtcacggttgaagccagctcaggcatctcggcaatgtcttcgttcttcgtatcaatagttgctgtcatcgataaaccaatacgcaaggggtgttccatgagttcttttggatcaagagaaacttcaaccggtacacgctgaacgattttgatccagttccctgtcgcattttgtgcaggtaataaggagaacgcattgccggttcccatattgatccctgtcacccgaccatgaaacacaacattttcaccataaagatcgctgataatattgaccgattgaccaatccgtacatccgtgagttgtgtttctttaaagttggcattaacccacatttgacgtgccggtacgacagccattaacgattgtccggggctcactgtttcgccgacctgaacacttctctgggcaatatagccggtaaccggactcttaatatccgtacgtttaagcgccaaccaggcttctttagttgcatccgccgcttcaacgacttgtggctgacggtttaatggtgtgttcattactaaagctttattcgctttataagcctggatagcggcattcaatgccgctttgctacttattaacgtatctttggtatgctccagcgtttcttttgaaataaccccctgcttcgctaacggcactcgacggttataatcttctaaagattgttgatactgaatacgtgctgaagcgacttcggcactgtattgtttatcctgtaagtatagtttattcgtttgccgaacaatatttgccagattatttttagctttattgagtgcgatagtggcatcagttttatccagtgaaactaaaatgtcaccttgtcgaacgtagttcgtatctttatgattaacgacagtgacactacctgagacttgtgcagaaattggatctgcattccccgtgacataggcgtcatctgtactaatcatgtcttctaattccattgaccaataggcataggcacctgaaaacgcaataaataaaactaccgccaataaagaaaagtattttcttctgttagaatgttttttatttgaattaatctgttccactattatctctcatttctcatagatgaaatttatgaattgaatgaaaagagcattcattcttcatatcaaacacagtgcatgtgttgcacattatcccaggaacgttggaggcctaatttaaatgaggtgcaaaaaaaacaacagaggactaaaccgtggcttttgcaatacaattcttacgcctgtaggattagtaagaagacttatagtgccaacttgaaactataaatcatcggtacaatccctgattttattgttgacatttcatttatgccgactatttatatggtatacttgtcgaattatcttaaaggaagctcagattttcttatttttattgagaaaatgagatgacgccttatgtctgtattactacagggagaagggagatgcttcattgcaaagggaataatctatgaacgcaataattattgatgaccatcctcttgctatcgcagcaattcgtaatttattgatcaaaaacgatattgaaatcttagcagagttgactgaaggcggaagtgccgttcagcgggtggaaacacttaagcctgatatcgtcatcattgatgtcgatatccccggagttaacggtatccaggtgttagaaacgctgaggaagcgccaatatagcggaattattattatcgtctccgctaaaaatgaccatttttacgggaaacattgtgctgatgctggcgctaatggtttcgtgagtaaaaaagaaggcatgaacaatatcattgcggctattgaagctgcaaaaaatggctactgctatttccccttctctctcaaccggtttgttggaagtttaacgtccgaccagcaaaaactcgactccttatcgaaacaagaaattagtgtcatgcggtatattcttgatggcaaggataataatgacattgctgaaaaaatgttcatcagcaacaaaactgtcagcacttataaaagtcgcctgatggaaaaattagaatgtaaatcactgatggatctttacacattcgcacaacgtaacaaaatcggctaaccacatgaagtttttaccctatatttttcttctctgttgtggtctttggtcgaccataagtttcgcagacgaagattacatcgaatatcgtggcatcagtagtaacaaccgtgtcacacttgatccactacgtctgagcaacaaggaattacgttggttagcgagcaaaaaaaatcttgtgattgcagtacataagtcccaaacggctacgttgttgcataccgattcgcagcaacgggttcgtggtattaatgctgattatttaaatcttttaaaaagagcgttaaatatcaaattaacactccgggaatacgcagatcatcaaaaagcaatggacgcgcttgcagaaggtgaagtcgatatagtgttatcacatttagttacttcgccgcctcttaataatgacattgctgcaaccaaaccattgataattacctttccggcgctggtaaccacccttcacgactcaatgcgaccgcttacctcaccaaaaccagtaaatattgctcgggtagcaaattaccccccagacgaggtaattcatcaatcatttccaaaagcaacaattatctcttttacaaatttatatcaggcattagcatccgtctcagctgggcacaatgattactttattggtagtaacatcattaccagcagtatgatttcccgctatttcactcactccttaaatgtagtgaaatattataactcgccgcgtcaatataattttttcttgaccagaaaagaatctgtcattcttaatgaagtactcaatagatttgttgatgctttaacaaatgaagttcgctatgaagtatcacaaaattggcttgatacaggaaacctggcctttctgaacaaaccattagaactcactgaacatgaaaaacagtggattaagcagcatcccaatttaaaggtgctggaaaatccttactcgcccccctattctatgacggatgaaaatggctcggttcggggcgttatgggggacattcttaatattattaccttgcaaacaggtttaaatttttctccgatcaccgtttcacacaatatccatgctggaacacagcttagccccggaggatgggatataatacctggcgctatttatagtgaagatcgagaaaataatgttttatttgctgaagccttcataacaacgccttacgtttttgtcatgcaaaaagcgcctgacagtgaacaaacattaaaaaaaggaatgaaagttgccattccatattattatgagctgcattcgcaattaaaagagatgtatccggaggttgaatggatacaggtcgataatgccagcgctgcatttcacaaggttaaggaaggtgaacttgatgctctggtcgcgacacagctaaattcgcgttacatgatcgatcattactatcctaatgaactttatcattttcttattcctggcgttccgaatgcatcgctttcgttcgcttttcctcgcggagaaccggaacttaaggatattattaataaagcactgaatgcaattcccccaagcgaagttctgcgcctgacggaaaaatggattaaaatgcccaatgtgaccattgacacatgggacctatatagcgagcaattttatattgttacgacattatccgttttattagttggcagtagccttttatggggattctacctgttacgctcagttcgtcgtcgtaaagtcattcagggtgatttagaaaaccaaatatcattccgaaaagcactctcggattccttaccgaatccaacttatgttgtaaactggcaaggtaatgtcattagtcataatagtgcttttgaacattatttcactgcggattactacaaaaatgcaatgttaccattagaaaacagtgactcaccctttaaagatgttttttctaatgcgcatgaagtcacagcagaaacgaaagaaaatcgaacaatatacacacaggtatttgaaattgataatggcatcgagaaaagatgcattaatcactggcatacattatgcaatcttcctgcaagtgacaatgcagtatatatttgtggttggcaagatattactgaaacgcgtgatctaattaatgcactcgaggtagaaaaaaataaagcgataaaggctaccgtagcaaaaagtcagtttctggcaacgatgagtcacgaaataagaacaccaataagctctattatgggcttcctggaacttctgtcgggttctggtcttagcaaggagcaacgggtggaggcgatttcacttgcctacgccaccggacaatcactcctcggcttaattggtgaaatccttgatgtcgacaaaattgaatcgggtaactatcaacttcaaccacaatgggtcgatatccctactttagtccagaacacttgtcactctttcggtgcgattgctgcaagcaaatcgatcgcattaagttgcagcagtacgtttcctgaacattacctggttaagatcgaccctcaggcgtttaagcaggtcttatcaaatttactgagtaatgctctcaaatttaccaccgagggggcagtaaaaattacgacctccctgggtcacattgatgacaaccacgctgttatcaaaatgacgattatggattctggaagtggattatcgcaggaagaacaacaacaactgtttaaacgctacagccaaacaagtgcaggtcgtcagcaaacaggttctggtttaggcttaatgatctgcaaagaattaattaaaaatatgcagggcgatttgtcattagaaagtcatccaggcataggaacaacatttacgatcacaatcccggtagaaattagccagcaagtggcgactgtcgaggcaaaagcagaacaacccatcacactacctgaaaagttgagcatattaatcgcggatgatcatccgaccaacaggctattactcaaacgccagctaaatctattaggatatgatgttgatgaagccactgatggtgtgcaagcgctacacaaagtcagtatgcaacattatgatctgcttattactgacgttaatatgccgaatatggatggttttgagttgactcgcaaactccgtgagcaaaattcttccttacccatctgggggcttacagccaacgcacaggctaacgaacgtgaaaaagggttaagttgcggcatgaacttatgtttgttcaaaccgttgaccctggatgtactgaaaacacatttaagtcagttacaccaagttgcgcatattgcacctcagtatcgccaccttgatatcgaagccctgaaaaataatacggcgaacgatctacaactgatgcaggagattctcatgactttccagcatgaaacgcataaagatctacccgctgcgtttcaagcactagaagctggcgataacagaactttccatcagtgtattcatcgcatccacggtgcggctaacatcctgaatttgcaaaagttgattaatattagccatcagttagaaataacacctgtttcagatgacagtaagcctgaaattcttcagttgctgaactctgtaaaagaacacattgcagagctggaccaggagattgctgttttctgtcagaaaaatgactaaatagcggctcccacaatgttcaaatgtgggagctatttaccagcacatcttacatttatgatgagaactcctggcgaatttgttccccatgctggtcgagcgttgccgctcccggcataacatgcgggtccgcgcagccgctgatttttatcggattacccggcatcattattcccccggcttcaatcaacatatttctcgcctgagtttgtggcaatttaatggcctcagccacacttaataacggcgcgacgggtacaccaacttcatgtattctggctaaccaaacttcagctgcctgcgtttttaacgtccgctcaatatattgtttaagaatagcctggttttgtacgcgtaaaatattgctgctaaatcggggatcattaaccagttccgtaagctccagtgcctggcataacgcagaaaaaagcttgtcattaccacaacaaatcgtaatcggcttatcctgagtattgaaaacatcaaaaggtgccatgtagggatggcgatttcccagacgttgtggtgacttcccagttgcgatatatgccatcagaccatgctccagaaaactcagcgtggcatcaaacatcgctatatcgacatgcgcccctctctggctcttttcgcggccataaagtgcactcactattccgctgaataaatagacaccgccgcatagatccgcaagagatgtaccaacgcgcactggcggagcatcaggatatcctgtttccatcattatcccgctcattgcctgaatgatggtatcgtaggcaggagcatcttttagcggaccggtatgtccgaaacctgacgatgaagcatatatgaggcgcgggttgatttcttgaagcgtttcccatgaaaaccccagtttttccattgtacctgggcgaaaattctcagctaatacatcagcttgtttgagcatatttataaatatacttttatcgtgatcattctttaaatcaagaaccacactctctttgccatgattaataaaactgtaatagagtgactgtccatccacatagggaccaaatgtgcgggtatcatcaccatgacccggcggctcaactttaattacccttgcgcccatattacaaagaagttgagttccgaaaggtccattaaggacatgtgtcatatcgataactaataagccttcaaacggccctttgctttcattatttgtcatttgcttatgccttgaaaaaagccgaaggtgaaaagacacttcggcatttatgtaaaatcaataacatgattaattatgaaaccagtcgactgacataaatccacaagggagccgtgacgacaaagcccagtacgctcacagccaatgacgctgtaccagtacgggtgtagacattaaaccggctggcaataatgattccggagaatgccggcggtaatgcgcctgccagtaccatcatctgcagatgttcgctgttcaaatgacatgccataccaacgagaagcagtgccagtggcatcagaatcagcttcaggaaggtgttataagcaatttcggcactgaactcgaatttatgtgcagccagagtcaaccccgcagcgaataccgctacccctgagttagccttcgcaatcagattaaaggttgggtcccatgctgccggaatttttaccccaaccaacaccaggatcgttgccagaacaggtgcccatactactggctcctttgccgcagaaattaatgcgctcagattactattcttcttaccatccgctcctgaagaaggattcagcaaatacagaccaataggaatagtaattgcgttaacaataatagaaataattgctaccactaaacctgttgatacggaatcaccataaataggatcgagaactgcaaaccccaggaatccaatggtaggtgaacctgcaattaatgcacatacagctgcttctgcatgggtacgtttaaaaaatttgtagcaaccgaaccaggagaaaaagaaacatccgacaataaccacaagtgatacaagggtcagacgagtgtccgcaaaaatcatttccctgtttgcccgagtaatagatacaaatagagccgcaggaagcgcgtagtttaataccagtttattaaatgcccgagcttgatcttctgaaaatgtttctcgtctgccgctaaaataacccaacagcatgattacgataataggcaataaatcgccaataaaaaatgttagcataatagtatttccgataagggtcccctcaccatcgcataatgagttggcaagaggagacgatgtcagtatttaattaccagcgacttgttttgggttaagtttggtaatatggccactttcagttcctgctgcagggtcgatgaccacattaataatggtcggtttgcgcgactgaataccggtggttaaagcatgacgaagttcatctgtcgtggtgacgttatagccaacgccacgaaacgcatccattaatttgtcataccttgcatggtgcaacagatccgttggtgatggtgcaccagcgccactgagatcaacaccgtctcctctgtagatgccgccattattaaaaataacgatcgtcaccggcaggttatatcgacaaatcgtttcaatttccatcccactgaaaccaaaagcactatcaccttcaatggcgacaaccggagaaccagaagtcacgctagcaccgatggcatagcccataccgatgcccatgacaccccaggtaccacaatccagacgacgacgtggtttatacatatcaataatatttcgtgcattatccagggtatttgcaccttcattaactaaataaatatcctggttctcgcgcaatacgtcgcgcacagcacttaatgcattaaagtaatttaatggttgagtatctgtacttaatttttcatgcattttttgtgcattttgctgcttgtggatatttaaaatatcgcgccataccagtggagtcgtaaatgtgttttgtttcagttctgccagcataccttgcatactggatgcaatatcaccaacgactggcacagcaatggggcggttgctgtcaatttcctgcggttcaatatccagttgaataaactgtgtatctgccgcccatccttttttaccgtgtgccaataaccaattcagtcgtgcaccaacaagcatgacaacgtcagcatttgccagggcaaacgaacgcgcagctgccgcagaaagtggatgcgtatcttcaaggatccctttcgccatagacattggcaggaatggaatctgagcactttcaataaattcacgaagctgttcatcagcttgtgaatacgccgcgcctttgccaaggataattaatggccgttcagcttttgctaaaagcgaaattgcgctagtgactgacttcgggcatggcaataatgctggcgacggattttcaactttaacaatcgtggttaacgcttcgtctttttccatcgtcgcggccaggacatttgctggcaaatcaagataaactccgccagggcgacccgatacagagacccggatagcgcgtgccaatgcaatgccaagatcctgcggctgattaacgcgaaatgctgctttggcatacggttttgccgcattcatttggtccagctcttcataatcaccttgctgtaggtcgacgatcgcgcggtcgctggagccgctaatcatgatcatcggaaaaccatttaccgttgcgttggccaatgcggtcaaaccattgaggaatcctggcgcagaaactgtcaggcagatccccggtttttgggtaagaaaaccgcttgccgcagcggcatagcctgccgactgctcatgacgaaaaccaatataacgaatgccttccgcctgggcatggcgtgccatatccgtcacaggaatacctacaacaccataaatagtgtcaatattattctgttttaatgcttcaacgatgatatgcataccatctgtcatttgaagttgatctgacatgattaataacctcgaaatttttataaattgggagccagaagcccccgttaatatcagatggcgtggttttgcttcattgcagcaatttcatcgtcgctataacccagctcctgcaatacagcagcggtatgttcacctaatagcggcgcagctttaatatccggcgtaaaggcagagaatttcattggacaaccaacggtcagatattttccacgcaacggttgttccacttcaacaacactgccactttggcgcaaagagggatcaagtgaaatttctttcatacttaaaaccggtgcacaaggaatatcaaactgagtcaaataggccaccgcttcatgtttatcaatagtgacagtgtatttttcgatttcagcaaaaatatcgaaaatatgtggctgtcgtgcatgggctgtactgtatgccggatcggtaatccattctggtttgccgatggctttacaggtgttttcccagttttgctcctgaatagtgaaataaatataggcgttaggatcggtttcccagcctttacatttcaggatccagccaggctgaccgccaccacctgcattaccaccgcggggaactgcatcaccaaatgtaccattcggatactgcgggtattcttccagataacccaatttatcgagacgctgctggtcacgtaatttcacgcggcaaaggttcaatacggcatcctgcattgacatggtgactcgttgcccacgccccgttttttcgcgatgcagcaaagcagcaagtaaaccgatcagcaaatgcattccggtgttgctgtcacccaacgctgcagcgcttaccagcggcggaccatcccaaaaacccgtagtggatgccgcgccacccgctgcctgagcaacgttttcataggcttttacattcacataaggcgaacactcatcaaaccctttgatcgaaccaaaaatcagacgtggattgatttcttgaatatgctcccaggtgaagcccatgtgatcaatggcccctggatgaaagttctcgactaagatatcagcttcgcggatcagcttttccattacctctttgccttccgctgttttggtatttaactcaatagaacgtttgttactgttaagcatggtgaagtaaagcgcatcgatatcaggaatatctcgcagctggtgacgcgttacgtcaccaacgccgggacgttcaattttaataacgtcagcgccaaaccaggccagcatttgagtacaagatgggccagattgcacaccggtgaaatcgagaactttaattccttgaagtggagttgacatagcaatacctattagttaattaaatatgtgttaatttagcgtttatttaaggcgtaatatcttctataaataacccgcaaaatatcgtcgtagctgcactcgatatttttaaaatcctgtatcaagtgctgaaaatcatttcatcgccacttccaattcctttctgcatggtaagtagtgaggacgaaaagaagaatatgataaatattgattcgtggtaatcagagagagtcgcgacatttgtgatgttattcttacaactgtaagaagcgccggtgatttacaagcaagggtatgattacgctttttaaagcgtaccataaaacataacataataaatgatttgtgatgacacgggattattgcggtttactttgaggaatataaaatgcgagtttatagcaccgcgagcgccaaataattttatgaccacaacctgtcgtattgtggtcataaaaaattgtcggctggagggagttaaatcctttacctcaatatactgcctgtcagcattagttcacaaacagtgcttcgctatcgacgatgattccatcttccgcacctttaagcgccaggtttgcctcgtagtattgctttttatcaagcagtttctgcgcatcagcaagtgcattacgagtctgtttaagtggcatcagatattggttttccattacgccaacaccggccaggcgaagctcttccattgcgccctttttatcccctttcgccattttttcattggcaatttttatcgcggcttctttttcgggagttgctacataactctcagaaattccgacagatgcattaatgacaatatattggtcatcattgagattggtctttttacctggcttagcgaactttgcccattcggtactgtcatctgacagcaaagcggaagcttcattggtcagttcttttgccttttctggatcgccatgaaacagagccaggcgcgctacctgcacgtcacgcatcgcatataaaccttgttcagagatacgctctgctgccgctgccgttttctgggtttgctgaacttgctgagtttgctgttgtgccgctaccggagcattatcagcagcccatacagttgaagatgccagaattgctgtgaccatcgtggccataattaaacgtttcatacttacctcattctttaacagttttagaaaacgccgccatcatattgggtgagcatgaaatgagaaatcagagagcaacggtcattttgaaagggttatcttacagttgtagttattatcgcaagaagtattttagtcttacaattgtaggaatatgcttcctgtcgcagagaactattcttatataccacaaagagatgtcatttattatatcgatgtaaatactgattaattaaatgtaaatacagccataacatcgtaggttctcagtgaaccattttcaggataactttctatgaaagtaaacttaatacttttcagcttatttttattggtctctattatggcatgcaatgtttttgcattttccatttcgggtggtggaagtgagaggagctataaagagactgaaaaaacatcagcgatgacgaccacacactctacaaaacttcagccatcacaggcgattttgtttaagatgagagaagatgcgccaccattaaacctcacagaagaaatgccgcccccttttccgacaaaggcgaattatcttattcatcctgtgcgatagcgtctttcacatggcaggtgaacaatcatgtctgatgctgatgtgaacacctgcccaaatgagccatcctgacccactaccgcctgccataccccaccataaagcgaatcatcaagccacaagccggggcaagaaacataaatatccccgtcactagttcattaccgccagttaaccacatggtgaagtaataaatgagtgcagcgaggatcaccatgccgaagaaagaagagaccgccgataccacgttcagtacctgaccgatgtagccgcttacgcagacaatacacagggcgagaaacatccataaattaatcatagctcaacctcctgccgcgctaaaaaacctgtaacttcagtcactttaatagtaagacaatccttaacctctggcaatttttgctaagcatcaatgaaaacagcatgttaaatgcaagactgttgtgtacggaaaaatatttactttgcacgattaataatcagtagctgaaagcagtcagcgagtgataaagtacagataccgcattcatgctcctcgtggttatgtcctgactagtctttacactctttacaggaaccattgtcgtacatgatggcccaaccaattgagtgtaccgctgtcgacatggaatcttctgcgatacaacaattcgtatctacagaaggtaactatgtttccacaatgcaaattttcccgcgagtttctacatcctcgctactggctcacatggtttgggcttggtgtactctggctttgggtacagcttccttatcctgttctctgctttctcggcacgcgtattggcgcaatggcgcgaccattcctgaaacgtcgtgaatctatcgcccgtaaaaacctggaactttgtttcccgcagcattctgcggaagaacgcgagaagatgattgccgaaaactttcgttcactcggcatggcgctggtagaaaccggcatggcatggttctggcccgacagtcgcgtacgtaaatggtttgatgttgaagggttggataaccttaaacgcgcacaaatgcaaaatcgcggcgtaatggttgtcggcgtccattttatgtcgctggaactgggcggccgcgtgatgggactgtgccaaccaatgatggctacctatcgtccacataataatcagctgatggaatgggtgcagacccgtgggcgcatgcgctctaacaaagcgatgatcggcagaaataatctgcgcggcattgtcggtgcactgaagaaaggtgaagcggtatggtttgctcccgatcaggattatggtcgtaaaggcagctccttcgcgccgttctttgcggtggaaaatgtcgccacaaccaatggcacctatgttctctcccgtctctctggcgcagccatgttgaccgtaacgatggtaagaaaagcggattacagcggatatcgtttgttcatcaccccagagatggaaggctacccgacagatgaaaatcaagccgctgcctatatgaacaagattatcgagaaagagatcatgcgcgcaccggagcagtacctctggatccaccgtcgctttaaaacgcgcccggtgggagaatcgtcgttgtacatttaacaaactgctcttactctttccctcctcaaatcggccataataacctcatggtttttatggcttttttcttaaggttttttccttcgctgaatatctaattattaccgtcagaaattaaactgtcgccgatatgagacacttgtaagttactaaaagtaaataagaaaatgcctcttgtctcgtttcagttttaggcgtacattagcgccgtctcgagcagtttagctcagaattctggggtgatgcccacggtaaaatacagggcttttaaggtcgctttgcccggtgtcaactcactgtatcaggtgtaatgaagtcattcaggcgtaacagtaattacgcggagagatgtaaagtgaaatatttctttatgggcatttcttttatggtcatcgtttgggccggtacttttgccctgatgatctaaaagcaaactgtgcaatgaaaaacaggagccatcaggctcctgtttgcatttctgacgacggtgtttattccgcgttttcgtgaatatgtttgctgctggcgggtagtaaaccgtcggcacggaacatcgctttaatccctctgatggcctgacgaatacggtcgcggttttcaatcagtgcaaagcgaacatgcgtatcaccatagtcgccaaagccaatccccggcgagacacaaaccttcgcttcgttaaggagcttcttggcaaattccagcgatcccatggccgcatatggttccgggattttcgcccagacatacatcgaagccttcggcatttcaaccatccagcccgcttcatgcagccctttaaccaatacatcacggcggcgtttgtactgttcggcaatgtcgcgcacgcactgttgatcgccctccagcgccgcaatcgccgccacctgcaacggcgtaaaggtgccgtaatcgtgatagcttttaatacgagccagggcgctgaccagcgttttgttgccaaccataaagccgatacgccagcccgccatgttgtagcttttcgacagcgtaaagaactcgactgccacatcgcgtgcacccggtacctgcataattgacggcgctttccagccatcgtagacgatatcggcataggccaggtcatggaccaccagcacatcgtagcgtttcgccagcgccactactttttcgaagaactccagttccacgcattgcgcggttgggtttgacgggaagccgaggatcatcatcttcggtttcggataactttcacgaatggctcgctccagttcgttgaagaaatcgacaccttccaccagcggcactgagcgtacctgcgccccggcaatcaccgcgccataaatatggatcgggtaacttggattcggcaccagcaccgtgtcaccatgatccagcgtcgccagcatcagatgcgccaggccctctttcgaaccaatagtgacgatggcttctgattccgggtcgatttcaacgtcgtagcgatcctgataccagcgggaaatggcgcgacgtaaccgcggaatgccgcgtgaagtggagtaaccatgcgtgtccgggcgctgggccacagtacataatttttcgacgatatgcggcggagtcgcaccgtccgggttacccatgctgaaatcgataatatcttcgccgcgccgacgcgcagccattttcagttcagcggtgatgttaaaaacgtagggcgggagacgatcaatgcgcgtaaagcgacgttcagggcgagtgtcagccataatttcctcagattaacgttagcgcccggaccgtccgagcgacgctgccacgatggtggctgttttgaaaatagcctgattaatttctgtctgtccagcgttttagaacattttattaatgacgttaaatgaggaactctgctttaaaaacaggaaatttatctgcgctaacaagaaaattaccactcattttattaacataataatttcaataaatttactaaccagaagtgcattatcaagagatgcattgctaatacaccatttatctatcaatccccttttaaaattgtggtttttcctcaaaaacggcctgctggtcatcagccttcaggttacctatcatagaggtttaatccttattcagagtcacccgtgcacgaaatattcaacatgctgctggcggtcttcgatcgggcagcgttaatgcttatctgcctgttctttctcatccgtatccgcctgtttcgcgaactgttgcacaagtcggcgcactccccaaaagaattgctcgccgttaccgccattttctcgctgttcgccctgttcagcacctggtccggcgttcccgtagaaggctcgctggtgaacgtacgtattatcgcggtgatgtccggcgggattctgtttggcccgtgggtaggcatcattaccggcgtgattgcgggtattcaccggtatttaattgatatcggcggcgtgacggcgatcccctgctttatcaccagcattctggcgggttgtatatcgggctggatcaacctgaaaatccccaaagcacagcgctggcgcgtcggtattctcggcggcatgttgtgtgagacgttgaccatgattctggtaattgtctgggcaccaactaccgcgttggggatcgatatcgtctctaaaatcggcattccaatgatcctcggtagcgtctgtatcggctttattgtgcttctggtgcaaagcgttgagggcgaaaaagaggccagcgccgcgcggcaggccaagctggcgctggatatcgccaacaaaacgctaccgctgtttcgccatgtcaatagcgagtcattacgcaaggtctgcgaaattatccgcgatgacattcacgccgatgcggtggcgattactaataccgatcatgtgctggcctatgttggcgtgggtgaacataactatcagaatggcgatgacttcattagcccgactacccgtcaggcgatgaattacggaaaaatcatcattaaaaacaatgatgaagcccaccgcacaccagagattcattccatgctggtgatcccattgtgggagaaaggggtcgtgaccggaacgctgaaaatttactactgccacgcgcatcagatcacctcgtcattacaggaaatggcggtcggtctgtcgcaaatcatctccacgcaactggaggtttcacgcgccgagcagctacgtgaaatggcaaataaggcagagcttcgcgccctgcaaagcaaaattaatccccattttctgtttaacgctctgaacgctatttcatcgtcaatccgtctgaatccggataccgctcgccagttgatctttaatctgtcgcgttatctgcgctataacattgaattaaaagacgatgagcaaatcgatatcaaaaaagagctgtatcaaattaaagactatattgccattgagcaggcccgctttggtgacaagctgacggttatctatgatattgatgaagaggtgaattgctgcattcccagcctgctgatccagccgttggtggagaacgccattgtccacggtattcagccttgcaaaggtaaaggcgttgtcaccatcagcgttgcagagtgcggaaatcgggtacgcattgcggtgcgagataccgggcacggcatcgatccaaaggtgattgagcgggtcgaagcgaatgaaatgccgggcaataaaattggcctgctgaatgtccatcatcgcgtgaagttattgtatggcgaggggctgcatatccgccgcctggagccggggacggaaattgcgttttacattcctaaccaacgcaccccagtcgcctcacaggctacgttattgctttgagccggagtgatattgtgaaagtcatcattgttgaagacgaattcctggcacaacaggaactgagctggctaattaaagagcacagccagatggagattgtcggcacctttgacgacggtctggacgtgttgaagtttttgcagcataaccgcgtcgacgccatttttctggatatcaatattccgtcgctggatggcgtgttgctggcgcaaaacatcagccagttcgcccataaaccgtttattgtgttcatcaccgcgtggaaagaacatgcggtagaagcgtttgaactggaggcgtttgactacattctcaaaccgtatcaggagtcacgtattaccgggatgctgcaaaaactggaagcggcctggcaacaacagcagaccagcagtacgcctgccgcgacggtaacgcgtgagaatgacaccattaatctggtgaaagatgagcgaataatcgtcacgccaattaacgatatctattacgccgaagcgcacgagaaaatgacctttgtctatacgcggcgtgaatcctacgtaatgccgatgaacattaccgaattttgcagcaaactgccgccgtcgcattttttccgctgccatcgctcattttgtgtcaatctgaacaaaatacgcgaaatcgaaccgtggtttaataacacctacattctgcgactgaaagatctggattttgaagtgccggtcagccgcagcaaagtgaaagaatttcgccagttaatgcatctttaatcgggaactttcatgaaagcaccaggcttgcccgccgatcaacaatttttcgccgatctgttcagcggcctggtgcttaacccgcaactactggggcgcgtctggtttgccagccagcctgcctcgttgccggtgggcagtttatgtattgattttccccgtctggatatcgtgctgcgcggcgaatacggcaatctgctggaagcaaagcagcaacgtttggtggaaggagaaatgctgtttattccggcgcgcgcggctaatttaccggtcaacaacaaaccggtgatgctgttaagcctggtgttcgctccgacctggcttgggttatcgttttacgatagccgcaccacgtcgttgttgcatcctgctcgccagatccagcttcccagcctgcaacgcggtgaaggtgaagcgatgcttaccgccctcacccatcttagccgttcgccgctggagcaaaatatcattcagccgctggtgttaagtttgctgcatctttgccgtagcgtggtgaatatgccgccgggcaattcgcagccgcgcggcgattttctctatcacagcatttgtaactgggttcaggataattatgcccagccgctcacccgcgagagcgtggcgcagttttttaatatcacgcccaatcatctgtcaaaactgtttgctcagcatggaacgatgcgttttatcgagtatgtgcgttgggtgcgaatggcgaaggcgaggatgattttgcagaaatatcatctgtcaattcatgaagtggcacagcgttgcggttttccggatagcgactatttttgtcgcgttttccggcgtcagtttggtctgacgccgggagagtacagcgcccgttttcagggctaacgtcagaaggttaattctgtttccagcagcgtcaggatactttgtgcatcttgcgcggcaaacaacgactggcggaagtttttattcaccagtttacgcgccagctgcgagaagactttcacatgattcatcccttcgttagcacccagcgtcagcatgatcaccagttcgacttcgcccatttctgactgccagccaatcggtttcgccagccgggcaatgctgatactggaatgacggatccactgagatttggtgtgcgggatcgctacgccaaaaccaacgccggtggtaacaatctcttcccgctgccagacatcttcttccagctcaaacggatgttcagtgcgcccgttaacgccgaggttgccgcacaggaactggatcgcctgctctttattgctaaaatcctgatcaacaaagatattctccagcgccagcagtgggcgaacgtcttcttccggcgtaaaggcggtgagtaacgcttcaatttcctgcgcactgcggcattcacatgcctgacgcgccagttcccgacacgcctcgctatccagttgacgaagctggcttttcaccgccggaatacgcgggctactcatactcagctcatccaggcccagcccaagcagtagcggcagataacggctttcaccgcccagttcaccgcaaatgcctacccatttgccccgctgatgcgcagtggtaactatttgctgcaacatgcgcaggaacgatggcgtaatcgggttatatagcggcgatacgcgcgggttattacgatcgaccgcatacagatactgggtcatatcgttggagccgatactgaagaaatcgacctcatcgcagaagtggtcgatgatgtagcacaccgacggaacttccaccatgatcccaagcgtaatcgtctctgcatgacgcaggccatcgcgcttaagctcaacgatcgctttttggatctcgcctttcacccataagatctgatcgaggctgtgaaccatcgggatcatcaactgggcgttgccgaaactggcggcgcgcaaaatggcccgcagttgagtgcggaacaggccagcaaattccgggtaaatacgtaccgcgcgatagccgaggaacgggttctcttcctggggaatattcagataaggaatgcttttatcgccgccgatgtccatcgtgcggaagataatcggcttgtcgcccgccgccagtagcacctgctggtaggcttcaaattgctcctgctcgtccggcgcgctgtcgcgatccatatagagcatttcggtacggaacagcccgacaccttccgcgccgttggcaaacgcgcctggcgcttccagagcggtgccgatattcgccgcaatatcaatacgcttgttatcacgggaataggccagctgcgcggcagcctgcgcctgttgtttttggcgtttatccgccagcgtctgcgcgacctgataataaccgctcaccgcgtcattcgggttaatcgccagcacgccgcactgggcgtcaagcactgcaggttgcccggcataacgggcaatcgcatccagcggcaagccactcagtaccgggatcgccgaggcacgggccagaatcagtgtatgcgaggtgcgcccggttttctccagaatcatgcccgcaagatttttcaaatcaaggctcaaaaactggcttggggttaaatcttcagccaccagaatggtcggtttttcaagcaccagcttgttgcgcggcttcagttccggccaggtgatatgcagcaactgttcgctgatatcgcgaatgtcgctaacacgttcgcgcagataatcgctggcagaggcagaaagtttggcgcaaacctgctccatattgctgatgatcgccgcccccagcccctgatgctgttctgtcatcaggcgacggatattgcctgcaaattcatcatcctgaatcagcgacaaatgggcgctgaggatagttttgctttcgccgtcacgctcacgcaattgctggttcagttgctcggcaagcgttgccaggctgtgctccagccgggtggaatcttgcgcactggcggggattgcccgataactgtcgaggctgtcgctttgtaacagggtcagcgtacccacgccgacgccgcttgccagcacattgccgtacagtaaatccgggttaaggcggcttaatgaacgcggcagcggatgcgccgtcagttctgcctgcgtaggctgaacgctgtcgctgtcgataaagcgcacctggatgtactcttccagcacgcgccgcgcctgctcttcatcgctgccgctaatgttcaggctgcaactgtcattaaatagggtgccggtgccaatcagcgccagcgagcttttcgcatctgcctttgcgttctggcgatggttaataaaagtgatttcgctttgccactggctgcactgttctttaagttcccacgccggacgagcatgtagaccgttaggcaaaggacagagaaattgaatcgttaacataaccgctccgggttaatcaggagatcatctgaaatccgtcagttgaacaaccgtctcacgcgtaagacgttgaataagggcagataaaagttgctgcatctgcaaaatgtcgcggcaatcggcaatcgatgcggcgcaatgtccatggcgggttgctggccccatcaccactgtgggcacgccggtgccggttaagtgcaccgccccgccgtccgtgccgccgttgctgaacatatctgcctgcaacggcacgccaatttctgccgccacggtttcgacccaggcggtaagttttggcggcgcaatcagcgacttgtcgcttaacaccagcatcggcccgttaccaatctggcgatggttagccgcgccataatcaaagtttttcgcccagcaggcggtatcaagcacaatggcgacgtccggcgacaccgcgcgggtggcagtttgcccgccgcgtaatcccacctcttcgctggaacttgccaccagccacacttccgcaggtagttcggcgtcgtgcagttcgcgcagtaacgtcaccagcagatagcaaccgaggcggtcatcaaaggctttccccatcactcgctggtgagggagaacctgaaaagtggtatcaaacgtgacgcgatcgccgggacgaattcccgcctgcatcacttcgtcataggagcgcgcaccaatgtccacgcgcatggcgctgacgtcattcccctgccggtcgccgtcaagcaggcctggaattttgcactcttcacgggtggtgatgcgcaccggctgcagctggcgggcagccatgcgtacgttgccaaccggcagcacatcaatcgccccttcgcgggagatgctgcgcaccataaatcccacttcgtccatatgcgcacagatcatcaccttcggacctgtcgattcattcaggcggatcagcaccgatcccagaccatcaaatcgcacttctttttgcaggcgatccgcttcttccagcaggatctgccgcacttcctgttccgaggaggcgatcgcatctgcctcgctcaacgcttttaatagcgataaatccattatgcctctcccgtgagcaacactgttttcggcatggcgtagagcacttctgcgccttgcggggtaaccagcacaacatcttcgatgcgcacgcccccttgccctggcaaataaatccccggctccacggtcagtaacatgcctggctgtagcgtcgtggtgtcccgcggtgaaaaacgcggatcttcatgaacttcaatgccgatagcgtgaccggtgttatgaccgaaatagtcgccataacctgcttctgtaatgacccggcgcgcggcatcgtcaacctgctggcagcgcacgccggggcgaatcgcggagattgctgcgagctgtgcctgcaggacaatttgatagacgttaaacagcaggtgagattcggcgctcaccccttcgccattcaccagcaaggtgcgcgtcatatcagagcagtagccctgatacagcgcaccgaaatcgagagtgacaaactcgcccgctgcaacaatcttgtcgctggctttgccgtgcggcagcgccccacgccagccactggcgacaatggtgtcaaaagaggctttttctgcgccctgctggcgcataaaccactccagttcagcggctatctcgcgctcgctcatccccgcctgaataaagcggcgaatatgctctgcaccgcgatcagcaatcccacaggcgaggcggattttctccacctcctctggcgttttgatttgccgcagcacatccggcgtggcgctaaccagtttcgcattgagttcagactgccagcggtgcgcggtttcccaactcacctgctggccctcaaaaccgagcgtttgcaactgttcatcggcaatgatttgattgacgatagtggtaagcgtgttcgtcgcgtcaagcaaatgcagctggtagccttgcgcacgggcttccacctcaacgtaatagcgcgaatccaccagaatgtgcgcactttcacggctaatcaccacataacctgatccggtggagatccccagatgcggctgtttgttctgccgtgaggagagaagcactgcatccagttgttgcgccttaagccagtcgcgcagcgaagcgagtaatgtcatctggattttccttcttacaggctatcgattaacaatttgcctttacggaacatcatcagacgcaggaacaccaccatcagcgcagttatgactgcccccagcgcgatccccgccatatagacgcccaggttagtgaccagcggccatgcccagatagcggactccgggaaccattgcactgcgcccagccagacagcggcggttgagccgacaatagcgccgaccatatacgacggaatggcggtgatggggctttccagcgcaaacggaatcgcaccctcactgatccccataaacgccaggaacatggcggtcttaccctgcggataaagttgagcgttgaacaggcgtttgccggttaaacgacggtcgataatggtcgccagccccagaccaatcggcggaataacgatagcgatagaacgagcggtgaccggtaatacgtggtcagtggtaaagctgaaggcaacaaaacctgcggctttgttgatcgggccaccaaggtcgattgctgtcgccgcggcgatccccattgcgtacatcagcgcgcccttctcacctgcggcagtcagcacagtacggataccgccgttgatccagccaccaaagggggtgatgacgtagtacatcgccagcatgacaaaaatggcggaaagaatcgggagcaaaaatgtggttttgaacgctaacaggaaatccggtaactggattttctggttcatccacttcacaaggtaaccggcaacgatagaaataatcagcgcaccaatgaaggtggacggcaccggcgaagaggtcgcccattgcatagtgctgggatcgaagttcagcagttgcgtcggctgggtagacatcaacccgccgataaaaccagccgggaacgccagtttgccaccgatagagttcgccacaaaagcagcaaacatcggaatggcaaaaccaaacaacacgccgccgaaggactgcgacagccaggcaaatttaagtaaggagaggtcgaaaccggagaatttcccgctattaagagcatccatgatgccgatctcagcaggaattttaagccagctataagcaatcagctggctgaaagcgaggatcacaccgcccataattaaggtcggcaccatgcgtgaaatccctgacatcacatgctgcgggagttcaccccagaagctggttttagaggcctgcggattcttaactgccgctgccgcaccggatgcgccaggcacaacggttgcactgcgttttttaatggccataacaattatccctgtcgaatattactgttgttcagaggcaatcatctcttcgatttctttgatgatgcccgcagcgtttttaattgcgtcctgcaaagtgatttcataaacgtcgcgtgattcgaaacgttcgttatcttccggggtaactgccacggagtggatgatgatggtcgcttcggcgatatcctgcgccgtcaggcgattctggataccgtccgcgccctgggtttcaattttcacttcataaccggcttctaccgccgcttcttccagcgcctgagcggccataaaggtgtgagccaggcccatcgggcaggcacataaggcaatcagtttcttactcatcgttaattcctcgttcagtgatagttgacgagtgaaattatgaacgtgcaaaacaaatcgccgttaccagacaaataatgcatttactggagaattaatcccgctgtacggaagtgtgacgcaggtcgaccttgtgaggggacacaaagaaaaattgaataaactgtatgatttaaaagattatcgggagagttacctcccgatataaaaggaaggatttacagaatgtgacctaaggtctggcgtaaatgtgcaccggaaccgagaaggcccggattgtcatggacgatgagatacaccggaatatcatggacatattctttaaagcgccctttatcttcaaatgcggcacggaaaccggaggctttgaagaactcaaggaagcgcggcacgataccgcccgcaataaacacgccgccaaatgtcccgagattgagcgccagattgccgccaaaacggcccataatgacgcaaaacagcgacaatgcgcggcggcaatcggtgcagctgtcagccagcgcgcgttcggtaatatcttttggcttgagattttctggcaggcggttgtcagctttcacaattgcgcgatacaaattcaccagcccagggccagaaagcacgcgctccgccgaaacatgaccaatttccgcacgcaatatttcgaggataatggcctcttcttcactattcggcgcaaaatcaacgtgaccgccttcgcctggcaagcttacccaacgcttatcgacatggaccagatgcgcaaccccaagccccgttccggcaccgtaaaccgcaataggcttaccttcgaccggttctgcgccaccaaactgaatcagatgctcttttttcagcatcgggatcgccatcgatacagcggtaaaatcgttaataatttccagatggctaaaaccgagattctttttcatttcggcaattgagaacgcccaggtatggttggtcatcgccacccagtcaccggtaattgggcaagcgatggcaatacagccgtctttcacctcgaccttatgttcttcaagataaacgcgaatgaccgcttcgaggctggggtaatcaagccctgaataggtcttagcctgcgagatttcaccactggcaatatcacacagagcaagacgtgcgttggtgccgcccacatcaccgactaatgcatactttgtcattcttcaactgctccgctaaagtcaaaataattctttctcacactgtaaatacctgggggcataacaacaacgccggaaaggcaggctccctgtaaatatcgatctgggtcacacaattactttatcgtttcagcaccaattgcagcgatgcctttttgcaagctgggcaaactaagtatctgaccccgcataaggaatagaacatgctccatccgcgagccagaaccatgttgttattatcgctccccgccgtggcaattgggattgcgtccagtcttattctgattgtggtgatgaaaatcgcctcggtattacagaatttgctctggcaacgactgccgggaactctggggatagcccaggattcacccctctggatcatcggtgtattaacgctaacgggtattgcggtggggttggttatccgtttcagccagggtcatgccggaccagaccccgcctgtgaaccgctgatcggcgcaccggttccgccctctgcgctacctggacttatcgtagcattaattctcggtcttgctggcggcgtcagcctggggccggaacatccgatcatgaccgtcaatatcgcccttgcggttgccattggcgctcgtctgttaccgcgcgtcaaccgaatggagtggactattttagcctctgccggaaccatcggcgcactgtttggcactcctgttgcggcggcgttgatattttcgcaaaccttaaatggcagtagtgaagttccgctatgggatcgtctctttgcgccgttaatggcggcagcagctggtgcacttactaccggattatttttccatcctcatttttcactgcccattgctcattacggacagatggaaatgaccgatattctcagcggtgcaattgtcgcggcgattgccatcgcagcagggatggtcgccgtatggtgcttaccacggttgcacgcgatgatgcatcaaatgaaaaatccggtgctcgtgctgggtattggcggatttattctcggtattctgggggttattggtggaccagtttcgctgtttaaagggctggatgagatgcagcagatggtggcaaatcaggctttcagcaccagcgattactttttgctggcggtaattaaacttgccgccctggtcgttgctgccgccagtggctttcgcggtgggcgaatcttcccggcagtgtttgtcggcgtggcattagggttgatgctgcatgagcacgttcccgccgtaccagcggcaataaccgtttcttgcgctattctcggcatcgtgctggtggtaacacgcgatggctggttaagtctttttatggcggcagtcgttgtacccaataccacattgctaccgctgctctgtatcgtcatgcttccggcatggctgttattagcaggtaagccgatgatgatggtcaatcgtccgaagcaacagccaccccacgataacgtttagcaaaaaatgctctcctttatgatttaagagttatggcgatgatacggggctttacctccccgtaatattgcgttaacaggccgctgacggcttcgagcgtgaaggagaataacaatgttcaggtcactgtttctggcggccgccctgatggcatttaccccgcttgcagcaaacgcaggtgaaatcaccctactgccatcaatcaaattacaaattggcgatcgcgatcattacggtaattactgggacggtggtcactggcgcgaccgtgactactggcatcgcaattatgagtggcgcaaaaaccgttggtggcgtcatgataatggctaccaccgtggctgggataagcgtaaagcgtatgagcgtggctatcgtgaaggctggcgcgatcgtgacgatcatcgcggaaaaggccggggtcatgggcaccgccattaaacgcgtccgccaatggagcacaatgcctgatgcgacgctagtgcgtcttatcaggcctacaaaccggctctttaacgcgtagggcggataaggcgtttacgccgcatccgccaatagtgccagatgcgacgctcattcaactacaatcccagcgccgtccccaccaacaaccagatattcagcgccacgaccagcaccacaatcacccagcctgtctgttttacgcgtttgctgttcaccagatcgcccatcaacttgctgtcactggtgaaaatcagcagtggaaccagcgccagagcgataccaaaacttaacagtacctgactcataaccagaatccgtgtcggatctaatcccatcagaatgacaataaatgacggcaacatggtgactgtacgacgcacccacagcgggatatgaaagcgaatgaagccctgcatcaccacctgccccgccagtgtccccaccaccgttgaagacagccccgcagcaaccaggcttaatccaaagaccgttgccgcagcgtggcttaacagcggttgcagcgtcagataagcctcatcaagatcggcaacaccagtatgaccggaaaagtggaacgccgccgcagctgtagccatcatcgccagattgacaaaaccggcaatagtcatggcgatagccacatcccatttggtggcggaataacgttgttgacgcgaaccgccatgtaaatgctgagtgagcgaggagtgcaaataaatcacatgcggcataatcgtcgcccctaacacgcctgctgccaggaagaccgcttccgaagtaggtaaactcgggatcaccattcctttacccagctgcgccaggttaggctgggagaaaatcaactcgacaatgtaagccgcggcaacaaacaacagtaacccgccaatcactttctccagcggtttttgcccgcgacgttgcagcattaaaatcaggaaagtcgcgatccccgtcagcaccgcgccctgcaacaacgaaacaccaagaatgagtttaaaaccgatcgccgcaccaataaattccgccaggtcggttgccatcgcaataatttctgcctgaacccaatagaaccacactacgggacgcggatagtgatcgcgaatctgctccgccagatttttaccggtggcaatccctagtttggcagagaggatctgaatcagcatcgccatcaggttggcccaaacgacaacccacagtagctgatagccgaagctagcacccgcctgaatattggtcgcaaagttaccgggatcgatataaccaatcgccgcaatgaacgcaggtcccattaatgcgagcctcatcttgcgcgccgcccgtccgctgctactctcaacgcgatagttcgtcatcttgtgcctctaaaacatagcctttgctatgtttcatgctatgccaaacgagaatgattatcaaattcatttaaatggattgtggtgatttctctgatagaccaggattatgactacgaaaagattgatgacttgaatgttatggttatgtttaatgttagcacatttacataactttcagcttccatacacaacatagcagaaatgtatgacagatcactatttttgaagcctgtcacaggacgtcattatagtgtgtgtcagatctcgttttccttaaccatgttacatagaatgtgcacggaaatttaacctgcctcatatttggagcaaatatggaccgcgtccttcattttgtactggcacttgccgttgttgcgattctcgcactgctggtaagcagcgaccgcaaaaaaattcgtatccgttatgttattcaactgcttgttatcgaagtgttactggcgtggttcttcctgaactccgacgttggtttaggcttcgtgaaaggcttctccgaaatgttcgaaaaactgctcggatttgccaacgaagggactaacttcgtctttggtagcatgaatgatcaaggcctggcattcttcttcctgaaagtgctgtgcccaatcgtctttatctctgcactgatcggtattctccagcacattcgcgtgttgccggtgatcatccgcgcaattggtttcctgctctccaaagtcaacggcatgggcaaactggaatcctttaacgccgtcagctccctgattctgggtcagtctgaaaactttattgcctataaagatatcctcggcaaaatctcccgtaatcgtatgtacaccatggctgccacggcaatgtccaccgtgtcgatgtccatcgttggtgcatacatgaccatgctggaaccgaaatacgtcgttgctgcgctggtactgaacatgttcagcacctttatcgtgctgtcgctgatcaatccttaccgtgttgatgccagtgaagaaaacatccagatgtccaacctgcacgaaggtcagagcttcttcgaaatgctgggtgaatacattctggcaggtttcaaagttgccattatcgttgccgcgatgctgattggctttatcgccctgatcgccgcgctgaacgcactgtttgccaccgttactggctggtttggctacagcatctccttccagggcatcctgggctacatcttctatccgattgcatgggtgatgggtgttccttccagtgaagcactgcaagtgggcagtatcatggcgaccaaactggtttccaacgagttcgttgcgatgatggatctgcagaaaattgcttccacgctctctccgcgtgctgaaggcatcatctctgtgttcctggtttccttcgctaacttctcttcaatcgggattatcgcaggtgcagttaaaggcctgaatgaagagcaaggtaacgtggtttctcgcttcggtctgaagctggtttacggctctaccctggtgagtgtgctgtctgcgtcaatcgcagcactggtgctgtaagaccatacataaaaaagccggggataattcccataagcgctaacttaagggttgtggtattacgcctgatatgatttaacgtgccgatgaattactctcacgataactggtcagcaattctggcccatattggtaagcccgaagaactggatacttcggcacgtaatgccggggctctaacccgccgccgcgaaattcgtgatgctgcaactctgctacgtctggggctggcttacggccccggggggatgtcattacgtgaagtcactgcatgggctcagctccatgacgttgcaacattatctgacgtggctctcctgaagcggctgcggaatgccgccgactggtttggcatacttgccgcacaaacacttgctgtacgcgccgcagttacgggttgtacaagcggaaagagattgcgtcttgtcgatggaacagcaatcagtgcgcccgggggcggcagcgctgaatggcgactacatatgggatatgatcctcatacctgtcagttcactgattttgagctaaccgacagcagagacgctgaacggctggaccgatttgcgcaaacggcagacgagatacgcattgctgaccggggattcggttcgcgtcccgaatgtatccgctcacttgcttttggagaagctgattatatcgtccgggttcactggcgaggattgcgctggttaactgcagaaggaatgcgctttgacatgatgggttttctgcgcgggctggattgcggtaagaacggtgaaaccactgtaatgataggcaattcaggtaataaaaaagccggagctccctttccggcacgtctcattgccgtatcacttcctcccgaaaaagcattaatcagtaaaacccgactgctcagcgagaatcgtcgaaaaggacgagtagttcaggcggaaacgctggaagcagcgggccatgtgctattgctaacatcattaccggaagatgaatattcagcagagcaagtggctgattgttaccgtctgcgatggcaaattgaactggcttttaagcggctcaaaagtttgctgcacctggatgctttgcgtgcaaaggaacctgaactcgcgaaagcgtggatatttgctaatctactcgccgcatttttaattgacgacataatccagccatcgctggatttcccccccagaagtgccggatccgaaaagaagaactaactcgttgtggagaataacaaaaatggtcatctggagcttacaggtggccattcgtgggacagtatccctgacagcctacaaaacgcaattgaagaacgcgaggcatcgtcttaacgaggcaccgaggcgtcgcattcttcagatggttcaacccttaagttagcgcttatgggataattccccggtttttttacgcctgttaatcagctaatggctgcgggcgaccaatcaaatacccttgcagatattgcaccccgagcttatgcaatagcgcctgctgctgttgcgtctcgacaaactccgcgaccacactcaatgacttcgctttcgccagatcggtaattgatctcacaatcatcgcatccagcgtgttcgtgacaatatctttcacaaagacgccatcaattttgatgatatcagcctgcaaacgctttaaccgttcgtagttggcatatccggtgccaaagtcatcaatcgcaatccggaaaccaaacttatgcagctgctcgatgttgtacatgctgctttctgcgttagaaaacgcctgctcctcggtgatctcaagaatgaccgcctgcggggagatgtgataacgcttaaacagacgaataatccgcccggcaatattcttttgcagcagcgtgagcggcattaaattgactgaaaagcgcggtccttttttgtcgcaagggtgtgttgccagccacttcaacaaggattccagcacttgcaaatcaaaacgcgcgctaaggttaaactgagcaataaggggcagaaacttatccggggtcataatgccgccgtcatatttcagtcgcgcgaggatctcatcataaccttcaccctctttgttgcgaattggctgggcgtagagcagcaaatcaccctgatctaacgccgtgcgaatggtattcagcaatagcacctgtttagtggtctgcccggaaaccatctcctctctgctatccagcgccagcacatgatgatgtgcgcaggattgctccgccagccagcttaactgccccaacaagggttgcagggtttcctgatttccatcaaaacgcccccaggcagcaccatagcccatatccagcccggtattgttccagtgaatttgccgactattcaggatgttaaccatatgctggagtcgcccttccgtttccggcccgctcagcactaacagcagttcactacccggcaattgatacaacttttcgttttcctgcatcaacggcagcagcgtacggcaaattgagcggatacagtgaacgcgcatcattaagccgtaatgacgactcataaactcaagattatcaatgcgcaggcagcaaaaactcttgcccgcctcttgctccggcgcttgttccaacgcacgaaagttgggtaggagcgttaacggatctgtcagcgcctgcaaatgccagcggcgattaagccattcactgcgatgataaatgcgcaccatatagagcaggcaaacgctaaaggaaatcagcaccgcaagaataaatgccagcgaatattcggtttccaccccttgcaaaaagttctggttgtaattcagaaggcaaagcgttgaaacagcccaggtgagatttaaaaacggatagcgaagcttaccgaccccgagggtaaagatgatgaagaaaacgggtaccaggtaaccggcaataaagtcgttttcataaggtgtgcacaacagaagtagcagcacgcttaacgctgccagccagcttaaggtaaatgcgcgtttctctttgcccaacgacggagcgatatccctgcgccacaatatctgcgcaaagtggggacttacaatcatgcgagtgagatagtagaaaagcatgttgtaaatcagcacagcggtgaaaaggcttagcaaatcaacgaccgtgaaaatggcatccgcatcgccgaaaaaggtggatatctttagcgggaaatcaaagaagctccccacaagatacatgctgcatttgatgccgatcggcgtcaccaaaccaagccagaacagacgttgccagacatatcggctggtcaatccataacgccaacgcgtccccagctgccagcgtaatattgcgcaggcacacaacacgacaaacgtctggctaccgagcatgaccgcagtctgtaaaaaagagagatgaaagttccacagattggtgcaaaacatcccgcataaaacgggaacgacaccgcgccagccaaagataaacaagattgacagcattacgcacagtggcatccacgccagaaagatataactggaatggataatggcaagtggcgaaataaaacgggatagctgaataagtaccacggtgagcgtaaacgctagtgtgaatatcttgatattttttatcaggttatgctccacaaacatgagtacactactctcactgatcggggttttcaggcacacaaataataagtttattcgcatcgcgaagcaaacagggggccagcctgttgccgatttttcatccaatgatgctttcaccaggcggcactaacccggacgtagactgtattacaaaagcggcaaaaagcagagacaaaaaacccccgctttgcagcgagggttggaaatttggtggagctaagcgggatcgaaccgctgacctcttgcatgccatgcaagcgctctcccagctgagctatagccccacgatgcgtttacgtaccaagtttgctgggtgcaaaatttggtggagctaagcgggatcgaaccgctgacctcttgcatgccatgcaagcgctctcccagctgagctatagccccgtcacgtaaagcttgtcgagttgacgggcggcatcatatgaattccgcccgaatgtgtcaacggcaaattgcaacgtgtagtttcaatcgctgaaaaatcaggcaaatgaacaattttggaaaaccgctcgcattcagtagttattcatgtcacggtttcctgtaaagtggtgttataaaatgaactactaatagacccacatacattcagggaattgttatgttcaaggagaggatgacaccagatgaacttgccagactgaccggctatagccgccagaccattaataaatgggtacgcaaggaaggctggacaacgtcaccaaaacctggcgtccagggtggcaaagcccgactggttcacgtcaatgaacaggttcgtgaatatattcgcaatgctgaacgtccagaaggtcagggagaagcgcctgccctttctggtgatgcgccgcttgaagtattgctggtgacactggcgaaagagatgacgccagttgaacaaaaacagtttacatccttgcttctgcgggaagggattatcggattgttacaacgcttagggattcgcgatagcaaataatatgaaaagattacgcaataaaatgaccaccgaagaactggctgaatgcctcggtgtggctaaacaaactgttaaccgttggatcagagaaaaaggctggaaaacggaaaaatttcccggcgtgaaaggcggtcgtgccagacttattctggtcgatacgcaagtttgcgagtttattcagaacacgccagccttccataacacaccaatgttgatggaagctgaagagagaattgctgaatacgctcctggagcacgcgccccggcgtatcgacaaatcatcaacgcgatagataatatgacagacattgagcaggaaaaagtcgcgcaatttttgtcacgtgaaggaattcgcaatttcctcgcccgtctcgatattgacgaatcagcataaataaaaaacggcaggatattatctcctgccgtttatctttttacacgctaattactgctgattttcgcgttcagcaataaaatccagcgctttgttgatacgctcgatactgcgggtcttaccaattgcgtgaacggtaacatccagtgctggagactgccccgcaccggttacggcgacacgcagcggcataccaactttacccatacccacttccagctcatccgccgtcgcctgaatagcgtgatgaacgttttcagcggtccagtcagtaatcgcggccagtttgtcacgaaccacttccagcggctgacgcgctaccggacgcagatgttttttcgcggcgtcggcatcgaactcagcaaaatcttcgtagaaataacggcagctctgtgccatctctttcagcgtcttgcagcgttcgcccagcagtttcaccagatcagccagctgcgggccgttacgggtatcgatattttcctgctcaatgtgccactgtaagtgagtagcaacatactccggcggcagcgcgttaatgtagtgatggttcagccacagcagcttgtcggtgttgaacgcactggcagatttgctgacggcattcaaagtgaagtatttgatcatctcttcacgagtgaagatttcctgatcgccgtgggaccagcccagacgcaccagatagttcagcagtgcttctggcaaataaccgtcatcacgatactgcattacgctgactgccccgtgacgtttggacagttttttaccgtcatcgccattgatcatagaaacgtgcgcgtaaaccggcaccggcgctttcagggccttaagaatgttgatctggcgtggcgtgttgttgatatggtcttcgccacggataacgtgggtgatttccatatcccagtcatcgacaaccacacagaagttataggttggggaaccatcggtacggcggataataagatcgtccagttcctggttgctgaactcgatcggaccacggatctgatcgtcaaaaacaacagaaccttcctgcgggttagcaaaacgtacaacacacggttcatcatcagcatgatgctcatggctgtggcggcagcgaccgtcataacgcggcttctcacctttcgccatttgctcttcgcgcagcgcttccaggcgctctttagagcaatagcatttataagcagtgccctcttccagcatctgatcgatcaccgcgttgtagcgatcaaaacgtttggtctggtagtacggaccttcatcccactccaggctcagccagttcatgccatccataatggcttcgatagcttccggcgtggaacgctcaagatcggtgtcttcaatacgcagcacgaactcaccgccgtggttacgtgcaaaaagccaggagtaaagagcagtacgcgcgccgccaacgtgcagatagcctgttgggcttggcgcgaagcgagttttgattttcatgaaatggccttacgtttagaaagatgccgacaaccggcaaatcctggaaaaattaagtgggcgatattctatcactcccgcctgattcctcaatgtagttcgggtttctaccttacgcattattgttttcgttgacaaattgcgcaacacggtctgttttgcgatcatcttgcttaaatttacgacgaacgaacaatttctttagaaaatgcgttgactcattttgaactctccctataatgcgactccacacagcgggggtgattagctcagctgggagagcacctcccttacaaggagggggtcggcggttcgatcccgtcatcacccaccaactactttatgtagtctccgccgtgtagcaagaaattgagaagtgggtgattagctcagctgggagagcacctcccttacaaggagggggtcggcggttcgatcccgtcatcacccaccactttctcgccagctaaatttcttgtaaaaatgtgaagtaccgaagtgggtgattagctcagctgggagagcacctcccttacaaggagggggtcggcggttcgatcccgtcatcacccaccacttcgggtcgttagctcagttggtagagcagttgacttttaatcaattggtcgcaggttcgaatcctgcacgacccaccaatgtaaaaaagcgccctaaaggcgcttttttactatctgcgatactcaaagattcgaacctgcagcaggtttgagttgagcgcagcgaaacaacggagccgctcgcggcgacggcccgaagggcgagcgaagcgagtcatcctgcacgacccaccaatgtaaaaaagcgccctaaaggcgcttttttgctatctgcgatttgcgaaattgcctgatgcgcttcacttagcagactactatttccggcaattcctgtctcctcacctactgtgtcaatgcagccaacagcttaaccatcgcgggcgtcacctgctgtgtttcataaacaatatataaatctgcagggatgcgctgtttgagcggacggaaaatgacacctggccagttcatttgtgcgtagctgtccgctatcaatgtgataccaatgcccatactgaccatagcgagtaccgtttgcggttcattaacttcgcgaataacaaccggtgaaaatcccacctgctggcaaactcgctgcaaaaaatcccagtcagtgtaaacgggcggcattgtaacaaaatactcgtcacgtagcgcttccagcgggacggtggaaaatgatgagagatgatgctcttcaggcatcgccaccagaaacgccgattcatgcaaccgtaagctggtaaaaccagtcggtggttctgtcgccattcgccagatcccggcatcaagttcgcggcgttccagcaaggccatttgcatcgcgggcatcttttcgcgaaaaagaacgtcaacgttaggattttccctgaggaatcgccgcataaccgggcgcatccgtccccacattgccgttcccactacgccgagttcaatccgccctgcttctccccgacctatttgttcaatccgagccaatacattattagcattcaccagcaatcgacgcgattcttccatcaagattttgcccgcgtgtgtcagtacgacgctgcgcgaatggcgaataaaaagctgcgtgccgagttgattttccagctctttaatatgaatgctgagcggaggctgagacatatttaaacgcgctgctgcgcggccaaaatgcaactcttccgctacggcaagaaaataacggagcaacttaagatctgttctgtatacgcgttccataattaagtgctccatataataaatacatcgtattaaattatcatggcataaagtatttcaccaccagatatccgacatacataaacacaatggataatatacccggtaatacatttggtacaggaataggcaagcgcacgattgtaaacaaagcaccaataccaaaaccaacgccggaagaaaataaaatatctttcactaattaacctttatcataaaagcagctctgaagagcagagccgcgaatccttttaatgagtcaccgctcgatgctttatcttttcagggtcatgattatatttaaacccaaagaaaaatatcactgcgagaaaaagagcatatcctgcaaacaccagccagatagtttgccagtcttttacgccatccaccgaaaagtaatctactgccatgccactcagaatcgagccaacccatgcgccgacaccatttaccatggtcataaagagcccctgcgcgctggcacgaatgctggaatcaacttcctgttcgacaaataccgaaccagaaatattgaagaaatcgaatgcacagccataaacaatcatcgacagcagcagcaaaataaatccggttgttgacggatcgccataggcgaagaagccaaagcgcagcgtccaggccaccatactcatcagcatgacggttttaatgccaaatcgctttaaaaagaatgggatagtcagtataaagcccacttctgccatctgtgaaactgacagtaaaatggagggatatttcaccacaaaactgtcagcaaactccgggttacgggcgaaatcatgtaggaacggattaccaaaaacgttggtaatttgcagtaccgcacccagcatcatggcaaagaggaaaaagatggccatgcgtggatttttaaacagcacgaaggcatccagacccagcttgctggcaagcgatgtggtcgcttttttctccgcaaccggaatcttcggcaaagtcagcgcataagccgacagcagcaatgacgcaccggacgcgatatacagctgcagactactcaattccagatgcagcaggcttactgcccacatcgcgacaatgaaccccaccgtaccaaaaacgcgaatgggcgggaaagcggtcaccgggtcaagccctgcctgggcaagacaggaataagagacgctgttcgataacgcaatagtcggcataaacgccatcgcattgactaacatcacccaaaacatcatatccggatcagttacggatgccgcataaaaaagtacgcccgcacacaccaggtgacacagcatgtatgcacgttctgcgcgcagccatttgtctgcgatgatccccattataccaggcataataatcgcggcgatccctttggaactgtaaaccatgccaacattagcgccggtgaaatgaagagtattaatcatgtaagagccgagggtaaccagccagctcccccagataaaatattgcaaaaaggacattacctttaagcgcatcgcgatgctcataatcgtttccttgtcgcatcatttggcctcacccgcgaggccgtttcttattgtttttctcaggcaattttgcgcagaaagccacaaataaggttgatgaagttctgcttagagagctccgcagccgccagcgtttgcgcatgtgacaatttcacatcgcttaaaccttccgccatattggtaatcgcagagaccgcaacgactttaaggtcgcaatggcgagctgaaataacctcaggcaccacagacataccaacaacatccccaccaataatttgcatcatgcgaatttccgccgcagtctcgaaattcggccccggatacgagacgaacacgccctccgtcagagggaaaccctcttctttcgccactttttgtaacagtgcgcggtattccgcatcgtaggcatttgccagtgagaagaagcgctctccaaaacgatcatcgttaagacccaccatcggcgtaccgggcatggtgttgatatgatctttcaatgcgaccaggctgcctgcccccacttccggacgcagcgagcctgccgcattggtgcagaacagtagctcgcagcccagcagcttaaaggtacgaattgcgtcagtcataatggtcattccacgaccttcgtagaaatgtccgcgacctttcatacataccaccggtacgccctggagatggcccagcactaactcccccgcatgaccatgtaccgtacttaccgggaagcccggcagcttttcgtaggaaattgcgacagcgttctcaatctgatcggccagcgcgccgagcccggaacctaaaataaaggccactcgtggcgtgaaatcaggtttataagtcttgataatatctatgcaaaacagcgggttatgagaaaattgaacctgagacatacatatcctttttctgtagggtggaatctaacgcctttttatagcgaggttgtcccggctcttaccaatacacttttctcacgcattcaatagcgattcgatatcgatggatttatatcttttctctattaatccacggtaaaaactgtattggcgatattaattcctttgcattaacaatatgtcgtttttagcaaaccactttattaagcaatctactaataacgatcggcatagggaattatgctatgaaaaaacatcttttaactctgacactttcctctatattagcgatacctgttgtatctcatgcagaatttaaaggcggttttgcagatatcggcgtgcattatctggactggaccagccggactaccgaaaaatcgtcgaccaaatcacacaaagatgattttggttatcttgaatttgaaggtggcgctaactttagttggggagaaatgtacgggttcttcgactgggaaaacttctataacggtcgccataataaaccaggtagcgagcagcgttatacctttaaaaataccaaccgtatttacctgggtgacaccggatttaatctctacttgcatgcgtatggcacctacggttctgcgaatcgcgtgaatttccacgacgatatgttcctgtacggtatcggctacaatttcaccggcagcggttggtggttcaaaccgttctttgctaagcgttatacagatcaaacctattacactggcgacaacggctatgtcgccggctgggttgcaggttacaactttatgctgggcagcgagaaattcactcttaccaactggaacgagtacgagtttgaccgtgacgctacctatgcagcgggtaatggcggtaaagaagggctgaatggcgcagttgcactgtggtggaatgcaacatcacacattactacggggattcagtatcgatatgcggatgacaaactgggcgaagatttttaccaggatgcgataatctactccatcaaatttaacttctgattgattactgccggggctcccggcagtatgaattcactctatatctgatacaacggatccccttcccgcccagccattagcgcattgccctggtctcgtaccacgtcccataaagcttcagcggcggtggaaagtgaacggttcttcctgcgcaccagcatcaactggcgttcaacaaccggcgtaatgcgctttaccaccagtgggctaccttcaggcaatggtagcgccagtgcgggaagaatactgatgccgatgcctgcggctaccatcgggaacagcgtcgccggatgtccaatctcctgcacaatattcgcctgaataccattgcgcgccagcgctgcgtcaatcagcggtcggctgcctgacgcgtaatcctgcaacaccaatttcgctccctgtaatgcctgccagggtacataatcttccacggccaaagcgctatcgcgatggcaaagcagaaagaaaggctcggaaagaatcgcttcacattgcagatcgcccactgggcctggatcgatgacgatgccaaaatcgacatctccctggcgaatactttccattacccactgctgcggacgatcgtgcaggacaaactgaatatctggatagcggcgatggctttcagcaatgcattgcggaataagatgcgcggaaatggtctggctggcagcgacccgaacttttccgctcagttgttgccccatacgcccggtatcgcgcaacgtgctgttcagttcatccagcagtcgctcaagacgcaaagccagctgctgccctgcatctgtaagcaccacttcacgcgtggttctgtccagcaggcgaacaccagtatgattttccagttccttcacactgtgactcactgccgactggctcaggccgatacgctctcctgcacgactaaaacttttctcctgcgctactgtgacgaaaacctttaattgttttaaagaataattcatctgttttcttcatgaatggatgcaataaatcaattttatttctcaaactggaagaagcacaatagaaccatcgatcatctggagtctttatgaaactttttcgtatcctcgatcctttcaccttaaccctgatcacggtggtgttgctggcctctttctttccggccagaggcgatttcgtccccttctttgaaaatctgaccaccgcagctattgccctgctgttctttatgcacggcgcgaagttgtcgcgtgaggcgattattgctggcggtggtcactggcgactgcatttgtgggtaatgtgcagcaccttcgtgctgtttccgattctgggtgtactgtttgcctggtggaaaccggtaaatgtcgacccgatgctctactccggttttctctacttgtgcattctcccggctaccgtgcagtctgcaatcgccttcacgtcaatggcgggcggtaacgtcgcggcagcggtttgttctgcgtcggcatccagcctgctggggattttcctttcaccattgctggttggtctggtgatgaatgttcacggtgcagggggcagccttgagcaggtcggtaaaattatgctgcaactgctgctgccgtttgtgttggggcatctttcccggccgtggattggtgactgggtgtcgcgcaataaaaaatggattgcgaaaactgaccagacgtccattctgttggtggtttatacagcgttcagcgaagccgtcgttaatggtatctggcataaagttggctggggatcattgctgtttatcgtggtggtcagctgcgttcttctggctatcgtgattgtagttaacgtctttatggcacgccgactgagcttcaataaggcagatgaaattactatcgtcttttgtggttcgaaaaagagtctggcaaatggcatcccgatggcaaacattctgttccccacatcggtgatcggtatgatggtgctgcccctgatgattttccatcagatccaattgatggtctgtgcggtgctggcgcgtcgatacaaacgccagaccgaacagttacaggcgcagcaggaaagcagcgccgataaagcttaaagcggacgcttcaggggctggaccagttgcgtcagcccctcggttttaatcagcagcgtgatttgcattagctcaccgagcttccctgccgggaactcatctttgcgggcaaaccacagcagatactcctccggcaggtcgattaagcgacgccctttgtatttgccaaacggcattatcgtattggctatttcaatcagctgctctttttccatctcagctacccagcaaacgcagcatttccgcttcgtcgatgacttcaatgcccagttcctgcgccttcgccagtttagatcctgcagcttcacccgctatcaccagatcggttttcttcgacacgctgcccgcgactttcgcgcccagttcgaccagtcgagctttagcgtcatcacgcgacatctggcttaagctgcccgtaagcaccacggttttaccagcaaacgggctgtcaatctcttccgcgttgataacgatcggcgcaggccagtgaacaccttccgccaacagctcgctgatgacattgcggttgctttcttcggcaaagaagttgtgaacgtgggatgcaacgacaatgccaacatcaggcaccttttgcagctcttcaatcgaagcggcttccagcgcttccagcgtgccgaaatatgccgccagacctgctgcggtggcctcgccgacttcacggatgccaagtgcatagaggaagcgagcaaaggtggtttctttcgctttttccagcgcgttaaccacgttttgtgccgattttggccccatacgctccagtccggtcagtttgcctgcggtgagtttgaacagatctgccggagtatggacatattctttttcaaccagctgatcgatgattttgtcgcccattccgtcaacatccatcgcacggcgggaaacaaagtgtttcagcgactctttacgctgcgcaccgcaaatcaggccaccggtacagcgggcaaccgcttcaccttccacacgctcaacgtcagaaccacataccggacaatgcgtcgggaatacaacctcacgggtatcttccgggcgttcagaaagcacgacgttaaccacctgcgggatcacgtcgccagcgcggcgaatcaccactttatcgccaatgcgtaaaccaagacgttcgatttcatccgcattgtgtaaggttgcgttactcaccagcacgcctgcaacatggacaggttccagacgcgcaacaggcgtaatcgcgccagtacgcccaacctgaaactcgacgtcacgcacaaaggtcatctgctcctgcgccgggaatttaaacgctaccgcccagcgcggggcacgcgcgacaaagccaagctgctcctgctgtgccagtgagttgaccttaatcaccacgccgtcgatatcaaagcccagcgtcgggcggtcttcttccactttgtgatagaacgccagcacttcttccgccgattcacaaagcgttacccgatcgctgaccggcaacccccactttttaaattgcagtaaacggccaagatgagtatccggcagctcgccaccttccagaacaccaacgccatagcagaaaaaagtgagcggtcgcttcgctgtaatacgcggatcaagctgacgcagtgaaccagctgccgcattacgtgggttagcaaacactttcccgcccgtgcgtcgcgcatcttcgttaatcttttcgaaccccgcctgcggcaggaacacttcaccacgcacttccagacgcgccgggatattctctccgtgcagcttcagcggaatggcgcgaatagtacgcacattagacgtgatatcttccccggtggtgccatcgccacgggtcgcggcactgactaaaacgccattttcatacagaatactgacggcaagaccatccagcttcagctcacagcaccaggtgactttctcgttgtttttcagacggtcctgcacacgtttgttgaaagcaagaaagctttcttcatcaaaaacgttatccagtgacagcattggtacttcatggcgtatctggctgaaagccgccagcggcgcagcgcctacacgttgagtaggcgaatcaggcgtaatcagttctggatgtttggtttccagctcgcgcagttcgcgcatcagcctgtcgtattcagcgtcgggaatttccggcgcatccatcacatgataaagatattcatgatggcgaagcgtcgttcgcagttctgtcagttgttgttcgattgattccatatcgcaccatcaatgctaaaaacccccgacaagcgggggttcgaagaggagttaatttgccttaagtgtatcaggcgttggcgtctttgacttcgcggatgatgtcctggtactcgcgcaatttctgcggagtcatcatacggcgctgatcgtcaagcacgacaccgcccacttcatcggcaatatgctgcgcagattgcagcatcagcttgaagttctgcagctcgtcaccgtaagacggtacctgcataaagatagtgacacccggagtagtgaaatccttcatttcaggatcaaaggttcccggtttcaccatattcgccaggctgaataacgccgggccgctgccatccgggctaagatgacgatggtaaatattcatatcgccaaaaatgaagcccgcttgttgaatgctgttaagaagcagttcaccgtttagctcgctaccgtgatgcgccgcgacgttcatgataatcaccgcttctttgcgcttcggtttatccataactggagcaggttccgctacaggctcaggctgtggtgccgctacgggttctgcaggctggaaagcctgttgtgccggttgcggtgctgaatgcacaggctgcggcgctggcgcgacctgtggcgaaactggctgctgcaacggctgttcaggctgcggctgataggcaggctgctgcaccggctgcgctggatgcggagcatgttgcggcggtacctgcgcttcaggcggctgctggaccggttgacgcggctgcgcagacgcataaggcggttggtactggtgttgcggcgacggacgagcagcctcatgctcctgagcgttagccggggcatgattcacgcggtgaacacgaacctcaccaacgccctcatcatcttcgacatcctcgtcataagaatcgtcgtcacgttttgacttcattcgttttaatggccgatcgcggaacatagaagatcgttctttacggctggtccagaaaccatgtaccagtaaagcgattatggcgatcgcgccaacaatgattaatatcagacgcaaatcctgcatcattatattctctgttgttctaacaccttgccaccacggcaaacatttactcactaagagtatttgccgattacctcaagtgcaagtgcactattaactttcacagcacaaagatagatgaaatcgtgctttttgctgttttttcgaacatatcctaactgtccattgcgcaattacccggtaaaatacgcagaattttcctgggattggtcaaaaggagctcatcctgattatggtttcatcattcacatctgccccacgcagcggtttttactattttgcgcaaggctggaagctcgtctcgcaacctgggattcggcgtttcgttattttaccgctgctggtcaatattttgttgatggggggcgcattctggtggctctttacacagctcgatgtctggatcccgactctcatgagttacgttccggactggctacaatggctgagttatctgttgtggcctctggctgtcatctctgtgctgttagtgtttggctatttcttctccacgattgctaactggattgccgctccgtttaacggtttattggctgaacaactggaagcacgattgactggcgctacaccgccagataccgggattttcggtatcatgaaagatgtgccgcgaatcatgaaacgcgaatggcaaaaatttgcctggtatctgccgcgcgcaattgtattactaattctttacttcatccctggtattgggcaaaccgtcgcgccggtactgtggttcctgtttagcgcctggatgttagccatccagtattgcgattaccccttcgataaccacaaagtgccgtttaaagagatgcgcaccgccctgcgcacacgcaaaatcaccaatatgcagtttggtgctttaaccagcctgtttacgatgatcccgctgcttaatctgttcatcatgcccgttgccgtttgtggcgcgacggcgatgtgggtcgattgctatcgcgataaacacgcgatgtggcggtaacaatctaccggttattttgtaaaccgtttgtgtgaaacaggggtggcttatgccgccccttattccatcttgcatgtcattatttcccttctgtatatagatatgctaaatccttacttccgcatattctctgagcgggtatgctacctgttgtatcccaatttcatacagttaaggacaggccatgagtaagatttttgaagataactcgctgactatcggtcacacgccgctggttcgcctgaatcgcatcggtaacggacgcattctggcgaaggtggaatctcgtaaccccagcttcagcgttaagtgccgtatcggtgccaacatgatttgggatgccgaaaagcgcggcgtgctgaaaccaggcgttgaactggttgaaccgaccagcggtaataccgggattgcactggcctatgtagctgccgctcgcggttacaaactcaccctgaccatgccagaaaccatgagtattgaacgccgcaagctgctgaaagcgttaggtgcaaacctggtgctgacggaaggtgctaaaggcatgaaaggcgcaatccaaaaagcagaagaaattgtcgccagcaatccagagaaatacctgctgctgcaacaattcagcaatccggcaaaccctgaaattcacgaaaagaccaccggtccggagatatgggaagataccgacggtcaggttgatgtatttattgctggcgttgggactggcggtacgctgactggcgtcagccgctacattaaaggcaccaaaggcaagaccgatcttatctctgtcgccgttgagccaaccgattctccagttatcgcccaggcgctggcaggtgaagagattaaacctggcccgcataaaattcagggtattggcgctggttttatcccggctaacctcgatctcaagctggtcgataaagtcattggcatcaccaatgaagaagcgatttctaccgcgcgtcgtctgatggaagaagaaggtattcttgcaggtatctcttctggagcagctgttgccgcggcgttgaaactacaagaagatgaaagctttaccaacaagaatattgtggttattctaccatcatcgggtgagcgttatttaagcaccgcattgtttgccgatctcttcactgagaaagaattgcaacagtaatgccagcttgttaaaaatgcgtaaaaaagcacctttttaggtgcttttttgtggcctgcttcaaactttcgcccctcctggcattgattcagcctgtcggaactggtatttaaccagactaattattttgatgcgcgaaattaatcgttacaggaaaagccaaagctgaatcgattttatgatttggttcaattcttcctttagcggcataatgtttaatgacgtacgaaacgtcagcggtcaacacccgccagcaatggactgtattgcgctcttcgtgcgtcgcgtctgttaaaaactggcgctaacaatacaggctaaagtcgaaccgccaggctagactttagttccacaacactaaacctataagttggggaaatacaatgttccagcaagaagttaccattaccgctccgaacggtctgcacacccgccctgctgcccagtttgtaaaagaagctaagggcttcacttctgaaattactgtgacttccaacggcaaaagcgccagcgcgaaaagcctgtttaaactgcagactctgggcctgactcaaggtaccgttgtgactatctccgcagaaggcgaagacgagcagaaagcggttgaacatctggttaaactgatggcggaactcgagtaatttcccgggttcttttaaaaatcagtcacaagtaaggtagggttatgatttcaggcattttagcatccccgggtatcgctttcggtaaagctctgcttctgaaagaagacgaaattgtcattgaccggaaaaaaatttctgccgaccaggttgatcaggaagttgaacgttttctgagcggtcgtgccaaggcatcagcccagctggaaacgatcaaaacgaaagctggtgaaacgttcggtgaagaaaaagaagccatctttgaagggcatattatgctgctcgaagatgaggagctggagcaggaaatcatagccctgattaaagataagcacatgacagctgacgcagctgctcatgaagttatcgaaggtcaggcttctgccctggaagagctggatgatgaatacctgaaagaacgtgcggctgacgtacgtgatatcggtaagcgcctgctgcgcaacatcctgggcctgaagattatcgacctgagcgccattcaggatgaagtcattctggttgccgctgacctgacgccgtccgaaaccgcacagctgaacctgaagaaggtgctgggtttcatcaccgacgcgggtggccgtacttcccacacctctatcatggcgcgttctctggaactacctgctatcgtgggtaccggtagcgtcacctctcaggtgaaaaatgacgactatctgattctggatgccgtaaataatcaggtttacgtcaatccaaccaacgaagttattgataaaatgcgcgctgttcaggagcaagtggcttctgaaaaagcagagcttgctaaactgaaagatctgccagctattacgctggacggtcaccaggtagaagtatgcgctaacattggtacggttcgtgacgttgaaggtgcagagcgtaacggcgctgaaggcgttggtctgtatcgtactgagttcctgttcatggaccgcgacgcactgcccactgaagaagaacagtttgctgcttacaaagcagtggctgaagcgtgtggctcgcaagcggttatcgttcgtaccatggacatcggcggcgacaaagagctgccatacatgaacttcccgaaagaagagaacccgttcctcggctggcgcgctatccgtatcgcgatggatcgtagagagatcctgcgcgatcagctccgcgctatcctgcgtgcctcggctttcggtaaattgcgcattatgttcccgatgatcatctctgttgaagaagtgcgtgcactgcgcaaagagatcgaaatctacaaacaggaactgcgcgacgaaggtaaagcgtttgacgagtcaattgaaatcggcgtaatggtggaaacaccggctgccgcaacaattgcacgtcatttagccaaagaagttgatttctttagtatcggcaccaatgatttaacgcagtacactctggcagttgaccgtggtaatgatatgatttcacacctttaccagccaatgtcaccgtccgtgctgaacttgatcaagcaagttattgatgcttctcatgctgaaggcaaatggactggcatgtgtggtgagcttgctggcgatgaacgtgctacacttctgttgctggggatgggtctggacgaattctctatgagcgccatttctatcccgcgcattaagaagattatccgtaacacgaacttcgaagatgcgaaggtgttagcagagcaggctcttgctcaaccgacaacggacgagttaatgacgctggttaacaagttcattgaagaaaaaacaatctgctaatccacgagatgcggcccaatttactgcttaggagaagatcatgggtttgttcgataaactgaaatctctggtttccgacgacaagaaggataccggaactattgagatcattgctccgctctctggcgagatcgtcaatatcgaagacgtgccggatgtcgtttttgcggaaaaaatcgttggtgatggtattgctatcaaaccaacgggtaacaaaatggtcgcgccagtagacggcaccattggtaaaatctttgaaaccaaccacgcattctctatcgaatctgatagcggcgttgaactgttcgtccacttcggtatcgacaccgttgaactgaaaggcgaaggcttcaagcgtattgctgaagaaggtcagcgcgtgaaagttggcgatactgtcattgaatttgatctgccgctgctggaagagaaagccaagtctaccctgactccggttgttatctccaacatggacgaaatcaaagaactgatcaaactgtccggtagcgtaaccgtgggtgaaaccccggttatccgcatcaagaagtaattcttgccgcagtgaaaaatggcgcccatcggcgccatttttttatgcttccgccagcggcggcaaaatcaattcatcgctctcatgctgctgggtgtagcgcatcacttccagtacgcgcaaccccgctcggtgcactgcatcggttaacgccttccctttcagcaagccactgatgagctgagcacaaaacaggtcgccagtccctttcaggtcggtttttacccgtgaatgggaaatgacattcacgctgtcggcagtgaccaccacaacctgcatctcctgattttcttcattaccggaggcgctggtaaccaccacccattttaatgtgtctgaaagcagactttttgcggcagcaatggcactgtcgagatcgcggcaatttttaccggtcaggatttccaactcaaagatattgggggtaattccctgcgccagcggcagtaaatattgtcgatacgcttcgggaaggtcaggtttgacataaattccgctatcaatatcgccaatcaccggatcgaccatgatcaataggtcaggatggtctttgcgtagcgcagtcagccactcggcaaggattttgatttgcgatgccgttcccatatagcccgtggttacagcacgaagttggcgcagcgcatcacgctcctgaagcgcacgcaaatagccgctaaaccattcgtccggaatcgcaccaccgtagaaagtgtcataatgcggcgtattgctcagcaataccgtcggcacggcaaagacattcaggccgttctgtttgatagcaggcacggcaatgctgttgcccacgctgccgtaaaccacctgcgactgcacggcgacgatatccgcctgcagtgccctactcttatcgttaaacaacaacaaactactcatttaattttttctccttgccgatgatcctcatcgtaatccaaccgaaactttacctgattctggcagtcaaatcggctatcacaaaacaaggataaggtaattcaatgaagaaaatcatttgtctggtcattacactactaatgacactccccgtttacgcgaagttaactgcccatgaagaagcccgcatcaacgccatgctggagggattagcacagaaaaaggatttgatatttgtgcgcaacggtgatgaacatacctgctatgaagcggtttctcatctgcgtctgaagctcggcaatacccgtaaccgcattgacactgccgagcagtttattgataaggttgcttcgtcgtcatcgattactgggaagccgtatattgtgaagatccccggtaagagcgatgagaacgcacagccttttttacatgcgttaattgcgcagacggataaaacggtgcctgcggaaggaaattaatccgctttgggaaggcatttacaggaggtaacatgaaaaaacgctttatttatcacgatgaaaaatcgaataaattttggtggatagattacgaaggggatagtttagctgtcaactatggcaaggtaggtagtattggtaaattccagacaaaagagttcgataatgaagaacagtgtctgaaagaagccagtaaattgattgccgcaaaaatgaagaaaggctatcaagaagatccaaagtttaacttcatggatcgctactattttgatgatgaagaaattgggttacatgttaaaacgtcacacccaaacttccagtgccattttactgatccactttatatgtgttgctgggatgaagaatctccttttggcagcgatgaaggtgctgatgctctaaacgttcttgaaaatagcctccgtaaagagccggatctggactgtgctgatttccctcaaatgttaattgaaactatgtggggtatgaaatacatcgctatggacagtattcttgaagaggatgttcgtgcgcaattactagtcgatgaaatgagcactatccagagcaatatgattacctacgcaactgcattcggtcagattaaagtcatgggtaaaatctcccataaacttaaaaagatgggactcaatgcactagcgcgtcatcagcttaccgcaaaaattcttcaatggggtgacggtcaggactcaccaatacttcaaaaaatgattgatgaccttacggcgtttcctcacgaaaattaaatactgcatttgtcggcagcaacaactgttaaaaaagtgcgctttgtttatgccggatgcggcgtaaacgccttatccggcctacaaaatcgtgctaattcaatatattgcagaaaccttgtaggcctgataagcgtagcgcatcaggcagttttgcgtttgtcatcagtctccgatgctattaatccttaaatccccgccccctggctaaaatgctcttccccaaacaccccggtagaaaggtagcgatcgccacgatcgcagatgatcgccaccaccaccgcgtcagggttagcttttgccacccgcagtgctccggcaaccgcgccgccggagctgacgccacagaatattccttcccgcaccgccagttcgcgcatggtgttttccgcatcgcgctgatgaatatccagcacctcatccaccagagaagcgttgaaaatccccggcagatattccgtaggccagcggcgaatgccgggaatgctgctgccctcttccggttgcaggccgacaatggtcaccggtttggattgttcgcgcataaagcgtgagacgccggtgatagtgccggtcgtccccatgctggagacaaaatgagtgatgcgcccgccggtttgctgccagatttccggcccagtggtggtgtaatgcgcataagggttatcgggattattgaactgatcgagcagctttccttcgccacgattcgccatctccagcgccagatcgcgcgcaccttccatgccctgctctttggtgacaagaatcagttccgcaccataagcacgcatcgccgcacggcgttcctggctcatgttgtcgggcatcagcaatttcatgcgatagcctttcagcgcggcaatcattgccagcgcaatgccggtgttaccactggtggcttcgattaagacatcacccggtttaatttccccgcgcttttccgcctcgacgatcatcgaaagtgccgcacgatctttcaccgaacctgccgggttattgccttccagttttaaccacacttcactgccgttatccggccccattcgctgcaacttcaccagaggcgtattgcctattgtttgttctaatgtactcacgatctctatccatacgtggtgttgcctgatgcgacgcttgcgcgtcttatcaggtctacaggttacaaaccttgccattaaaaagcccggatcgcgggaagcgcctccgggcgtttaacattcactcaacctatcaggcgctttgtgcgagagcaagttcctcatcgcgggtttcgatacgctcgtcgccgttatacagccgcgcatgttgcagaccaacgaataaacgctcgccacgctgcggggcatcgtcgccatgcatcacgaccgtcagcggttcgttgtaccaccccagcggctgcaccactaattgggtgtagtgacctttcgggctggcttccagtacctgtaccggcagcggcgaatcgaggctggtacggcggctgatatccacttcccaagggcgcaggaagagatccaccggcccctgatacgcaggtgtgtagcccagcggccagcgatgcgcgccaacatggaactgcccgccgcgaatggttccctgcaggcggttcacttcgcccataaattcgagcacaaaacgggtcgccggttcgcgccatacctgatccggcgcgtcagcctgttcaatattgccctggctcatcacaactacacgatcagctacttcggtcgcttcttcctgatcgtgggtcacaaaaacgctggtgaattttagttcttcatggagttgacgcagccagcgacgcagctctttacgcacctgcgcatccagcgcgccaaacggttcatcaagcagcagaatttgcggttccacagccagcgcgcgcgccagcgccacgcgctgtttctggccgccggaaagctgcgccggataacgatccgccagatgggcaagctggaccatttccagcaattttgtcactttcgctttgatggctgcggcattcgggcgctcgcgacgcggcagcaccgtcaggccaaaagcgatattgtcgaacaccgtcatatggcggaacagcgcgtaatgctggaacacgaaaccgactttacgatcacgtgcgtgcaggcggctcacgtcggtgccgtggaagcgaatatgcccgctggtttgatgctccagcccggcgataatgcgcagcagcgtggttttcccggaaccggacggccccagcaacgcgaccatctgacctgaaggaatatccagtgagatatcgttcagcacctgggtgcgaccaaacgacttcttaatattggcaatctcaatgctcatgatgttcctcctgctgtgcgcgtttttcctgattctccaggcgccactgcaacatactttttaaaaacagggtgataatcgccatcagcgttaacagcgccgcagcggtaaaggagccgacggtgttgtagtcctgctccagcaattcaatctgtaacggcagcgacagggtttcgccgcgaatcgagccggaaaccaccgacaccgcgccaaactcgccaattgcgcgggcgttggtcaacaccacgccataaagcagcgcccagcggatgttcggtaatgtgacgcgacggaacatctgccagccggacgcgccaagcaaaatcgccgcttcgtcttcctggctgccctggcttaacatcaccggcaccagttcgcgcaccacaaacggacacgtcacgaagatggtgaccagcaccattcccggccaggagaacataatttgcaggttatgctcgtcgagccaaccgccgagcgggccgttagagccgtagaacagcaaatacaccagaccggcaaccaccggcgatacggcaaacggaatgtccagtagcgtcagcagtaactggcgtccagggaagttaaagcgcgtcaccagccaggccagcagaatgccgaacaccaggtttaccggtacggcaatcagcgcgatcatcaccgtcagccagatggcgtgcagcatgtccggatcggccagattctgtaaaaccggcatcagccccttgctgaatgcctgcacgaagatgtaaatcatcggcaccagcaggatgaacgccgaaaccagcatcccgatgccaatcagaaaccatttgccccagttaatcgggcgcgcgtcataacgcttcaattgggtaacttccgccattaatgacctaccacacgccgaccaaagcgactttgcagagtgttaattgagaacagcagcagcagagatgccgcgaggatcaccgaagcaatcgcgctcgctgccgggtaatcaaactcctgtaagcgcacaaaaatcatcagcgacgtcacttccgtcttccacgcgatatttccggcgataaaaatcaccgcgccaaattcaccaagactacgggtaaacgacagcgccacgcccgccaccagcgccggagaaagctccggcagcaccactttgcagaaactctgccagcgcgttgcaccaagcgtttccgccgcttcttcatattccgggcctaactcttccagcaccggctgcacggtacgcaccacaaacggaatgctggtaaaggccatagccaccgcaatccccagccatgtataggtgactttgatatcaaacttcgccagccattcaccgtaaaaaccgtttacggaaaagagcgaggccagcgttaaaccggcgacagccgttggcagcgcaaagggtaaatccatcagcgcatcaagcagcgtgcggcctgggaagcgatagcgggttaggatccacgccatcagcagaccgaaaacgccgttaaaaatcgatgccacaaacgccgacagcagcgttactttgtaggccgcgaccacctgcgggttggtgatcacctcccagtactgcgcccagctcatctgggccagttgcatcaccagcgcggagagcggcagcagcaaaatcaggcacacaaacagcagactggtgccgaggcttaaggtaaagcccggcagcacgcgtctggaggagacagcaaacatcagttacgccccgccgctaacagcttgtctaactcgccgccgctggtgaagtgggttttcatcacttccggccaggagccaaatttgtcttccacgcggaacagctcggtctgcgggaatttgtctttcagtttgtccatcacctccgggttattcacgcggtagtaatagtcggtgatgatggtttgcgcctgcgggctatagagccagttcagataggctttggcggctttttccgtaccgttggcctgcacgtttttatcaacccacgccaccgggaattccgccagaatgttggttttcggaatcaccacttcaaagccctgcgcttcatactgtttacggatgttgttcacttccgattcgaagctaatcagcacatcgcccaggccgcgctcggcaaaagtggtggtcgcgccacgaccgccagtatcgaacacttcaacgtttttcaggaactgggtcataaactgttcggttttgcctttgtcaccaccgtcagctttatccgctgcgccccatgccgccagataggtataacgcgcgttacccgacgttttcgggttcgggaaaatcagcttcacgtcggagcgcaccaggtcgttccaatcgtggatattcttcgggttacccttacgcaccaggaagcccatggtggagtagaacggcgagctattattcggcaggcgcgactgccagtcggccgggatcagcttgcctttatcgtgcaggatttgtacgtcggtcacctggttataagtgacaacgtcggcttttaagccctgtaaaatcgccagcgcctgttttgatgacccggcatgagattgttttatcgtcagtttgtcgccgccgttatcttttgcccattgttgctcaaacggcggattcagggcggcaaacagctcgcgggagacgtcataagaactgttcagcagttccgttgcctgtacatggcccgccagcagcagagaagcgaccagcgcgagtgagttctttttcagtaagttaacggccattgcgcacccttataaatttaatgactttctaatagccatcatatttataacggacgtgaaaggagtaacggttttatataccgtttggtgatttggaagttgaaaagggaataagaacttggttcaacaggcgtaattgttgcagtcagtttggacacgaacagcgcggagaaaccggagcgtacacatagtacgtgaggatttcgagcactgcccggggccaaaatgacaaataaaatagcctggtgaacttagttcaagacgaaatcctccccacaaatgcagggaggaaacagaggtgaatcagataccgacgctaaccgtctccggcagtgtgctgccgccatcaatcacattctgtgtaccggttaaatagctggattcatccgatgcgaggaaggccgccagttcgccgacttccagcggatcggcgaggcgacgcatcgggattgctttcgccatttcagtcagcaccgactctggatcttccgggttcgactggcgggcaatgctttccgccattggtgtgcgcacgtatcccgggcaaatggcgttaacgcgaataccagactgcgcgtactccaccgccagcgattttgtcaggccaacaatcgccgctttcgttaaggcgtacgccgtttcgccaggatcggccaccatatcaccagtgactgaagacatcatcacaatgcgaccatctttgcgggcaatcatctccggcagcaccgccttcgtgacgttccatacgcctttaatattgatgtcaatatggaaatcgcgatcgtcatcgctcatatcgaggaaactgcccagacgacaaacgcctgcgttattcaccaggatatcaatgcgcccttctttttccttcgcgcgtttgatagctgcggctaccgacgccgggtcacgcacatcggcgacaaccgccgtacagcgatgaccacgaccacacagttcgtccgccagcttttcgatctcaggggagatatccagcaagattaggttcgcgccatgacgtgcaaaagttctggcaattccttcgccaattccctgcaatgcgcccgtaatcagtgctgtcttgcccgtgagtttacccattttaatgctctccttgttaatacagagcgttacactccattccctctgaaaatacaggataaacaaaatattgctgcggatcagctcactaattcaggaaaatctcaatccagtcgctgctttatgcatcatttcaggcgttgtgttagctcactgctgcgctgaatcattttcaatgactccacatcattgagttgcacaaggccaacaaacagtaaatcggtaacagaattttgcgccgtgcgggtagacatcgacgagctacgccattcggtttctccggaaacggtatcgagggtgaaatgcgccagccgccgcagcggagagtcagtcagagaagtaatggcaatcaccgttgccccctgctttcgtgccgcttctgcgcacaagacaatctcttttttactgccgctgtaagagatagcgatttgtacatcgccttttttcaacgcctgagaaacggtggcttgtacgtgcgtgtcggcttcgcaggccacgcgatagccaattttcatcagtttgaacgacagatcgcgccccaccagcgccgatccgcccaggcccgttatctggataaacggtgctttactgatgacctcaatgattttttgcagccgcgcgtaatcgagcaacgcgcaggtttgctccagcgccagctctttttcgcgattcagtttgcgcgcgatcacttccagcgaatcatcactggtaatcgaactgtgcaggtgcagtgccgtggcattcgttttctcccggctggcactgtattcgcctattaacgccatacgcaattcagtaaatccttgcgcgccgagtttttgggcaaatttcactatgctcgactggctaatgccgagctgtttcgccatctgccgtgaagaaacggattgcagctcactcacgttggcctgcagaaagtcagcgattttttgctcgttttcggtgaattcactccccgcattgcttattttcgtcaggtacaacatcttccactctcctgggctggcagcataaattccgcttaagttcttatgacgctcttcacactctgcgagtgtagactcaatgattcctttaagcctgtcaattcgggatatatgattccatacatctgcaattatttgatcgtaaatagtaaggtcaccaccgatgcaatttgaaaagatgattactgaaggctcgaacaccgcctcggctgaaattgaccgcgtatcgacgctggaaatgtgccggattatcaacgatgaagataaaaccgtaccgcttgccgttgagcgcgtactgccggatatcgccgcggcgatcgatgttatccacgcccaggtaagcggcggcgggcgtctgatttacctcggtgcgggaacatccggtcgtctggggattctggatgccagcgaatgtccgcccacctacggcgtgaaaccgggtctggtggttggtttgattgctggcggcgaatatgccattcagcacgcggtggaaggcgcggaagatagccgggaaggcggtgttaatgatctgaaaaatattaatttaacggcacaggatgtggtggttggcattgctgccagcggtcgcacgccgtatgtgattgccggactggaatacgcacgccagctcggctgccgcacagtgggaatttcctgtaatccggggagcgccgtttcaaccaccgctgagtttgccattacaccgattgtaggtgccgaagttgttaccggttcttcgcggatgaaagcaggtacagcgcagaaactggtgctcaatatgctttccaccgggctgatgattaaatccggcaaagtgttcggcaacctgatggtcgatgtggtcgccaccaacgaaaaactgcatgtgcgacaggtcaatattgttaaaaacgccaccggatgtagcgcagagcaagcggaagcggcgttaattgcttgcgagcgcaactgtaaaacggccattgtgatggtgctgaaaaatctcgatgccgcagaagctaaaaaacgcctggatcaacacggcggctttattcgtcaggttttagacaaggaataacccatggccaaagagatcagcagtgaacttctgaacaccattcttacccgtgtcggcggaccgggaaatatcgccagttgtggtaactgtatgacgcgcctgcgtctgggtgtacatgacagttcactggttgatcccaatatcaaaacgctggaaggcgtgaagggcgtcattttgaccagcgaccaggtgcaggtcgtttttgggcctggtaaagcgcatcgtgccgcaaaagcgatgagcgagctgctgggagaagcaccggtacaggatgccgcagaaatcgccgcccagaacaaacgtcagttaaaagccaaacaaacctccggcgtgcaacaatttctcgccaaattcgccaccatcttcacgccgctgatccccggttttattgccgccggtctgctgctggggatagcgacgttaattgccacggtgatgcacgttccggcagatgctcagggaacactacccgatgcgctgaattttatgaaggtgttcagcaaaggtttgttcactttcctggtgattctggtgggctataacgccgcccaggcatttggcggcacgggcgtaaatggcgcaattatcgccgcgctctttttgctcggttataaccccgcagcgaccaccggttactacgccggttttcacgatttctttggtctgcccatcgatccgcgcggcaatattatcggcgtgctgattgccgcgtgggcctgcgcccgcattgaaggcatggtgcgccgctttatgccggacgatctcgacatgctgctgacctcgttaatcaccctgctgatcaccgctacgcttgcgtacctgatcattatgccgctgggtggctggttattcgaaggtatgtcatggctgtttatgcacctgaacagtaatccgttcggttgtgcggttttagccgggctgttcctgatcgccgtggtatttggcgtgcatcagggctttattcctgtttacctcgcgttaatggacagccagggattcaacagcttatttcccatcctttcaatggcaggcgcgggccaggtgggcgcggcgctggcactctactggcgggcgcaaccgcacagtgcgctacgcagtcaggtacgcggggcgattattcccggcctgctgggcgttggtgaaccgctgatttacggtgtcaccctgccccgcatgaagccgtttgttaccgcctgtttaggcggcgcggcgggcggtttgtttatcggcctgatagcctggtggggtctgccgatgggcttaaacagcgcctttgggccgtctggtctggtagcgctgccgctgatgacttccgcacaaggcatccttccggccatggcggtttatgctggcgggattctggtggcatgggtttgcgggtttattttcaccacgctctttggctgccgtaacgtcaatctggactgatatcatgaaacggacaatgctctatctttctctgctggctgttagttgtagcgtcagcgccgcaaaataccctgttctgacagaaagctcgccagagaaagcagggtttaacgtcgaacggcttaaccagatggatcgctggattagccagcaagttgatgtcggttatcccagcgtaaacctgctgatcattaaagataatcagattgtgtatcgcaaagcctggggagcggcgaaaaagtacgatggcagcgtgttgatggaacagcctgtcaaagccaccaccgggacgctgtatgacctggcctcaaacaccaaaatgtacgccacgaacttcgccctgcaaaagctgatgagcgaaggcaaactgcatcctgacgatcggattgcgaaatatattccggggtttgccgatagtccaaatgacaccattaaaggcaaaaacaccctgcggatttctgacctgctgcatcacagcggcggtttcccggcagatccgcaatacccgaataaagcggtcgcgggcgcgttatattcccaggataaaggccagacgctggagatgatcaagcgcacgccgctggaatatcagcccggcagcaaacatatctacagcgatgtcgattatatgctgcttggatttatcgtcgagtcggttaccggtcagccgcttgaccgctatgttgaagagtcgatttatcgcccgctcggcctgacacatacggtatttaacccgctgctgaaaggctttaaaccgcaacaaattgccgccacggaattgaacggcaatacccgcgatggcgtgatccatttcccgaatatccgcacctccactctctggggtcaggtgcacgatgaaaaagccttttattcgatgggcggcgtttccgggcacgcaggtttgttttccaataccggcgatattgcggtgttaatgcaaacgatgctgaacggcgggggctatggtgatgtgcagctgttcaatgcggaaacggtgaagatgttcaccaccagctctaaggaagatgccacttttggcctcggctggcgcgtgaatggtaatgccaccatgacgccgacgtttggcacgctggcaagcccgcaaacctacggtcacactggctggaccggaacggtgaccgttatcgatccggtgaatcatatgacgattgtgatgttaagcaacaagccacattcgccggttgccgatccgcaaaagaatcccaatatgttcgaaagcggtcagttgccgattgcaacttatggttgggtagttgatcaggtgtatgcggcgttaaagcagaagtaataaaaaggccagtcagtaatgttactggctggtctgagagtgctgacaaacgcaaaactgcctgatgcgctacgcttatcaggcctacgtggagcccacaatatattgaattagcacgatttcgtaggccggataaggcgttcacgccgcatccggcgtgtacaacgcgcacttggtcaacaatctgaggccagtcagtaatgttactgcctggcctttaatcaatgaatcagaaacgcttacagcgccatcaacttgtccagcgacggtgcgaaataatagccgccggttaccggtttggtgaaacgcaacatcgcatcacgcttaccatcggtatcgccaaacatgctcagcagttgctgctcaatgttatgcagacgcgcgcagtaggcgcagaagtacagaccgtgagtgccactggcagtgccgtacggcaggctctggcgaacaatcttcagccctttgccatcttctttcagatcaacgcgggtgaggtgagaggtttccggacgttcgtcgccgtcgatctcttcgttggcctctttggtgcgcccgatcaccatctcctgatcgtgaacgctcatccggttgagctgcttcaggttgtgttcccaacgctggacaaacacatagctgccgcccgcatccacgccgtctttgataaccgccacttcgcgacgcgtctcttcacccgccgggttttccgtaccgtcaacaaagccgctcaggtcacgctcttcaacccaacggaagccgtggatctcttctttcacttcaatgcagtcaccaaaggcttccatcgccgcctgggcgacagagaagtttacgtcgtgacgcagagaaagaatgtggatcaacacatcgaactgggtcgtcggcgcaaggcctttaccgtagcccggaaaatctttcagctcttctgccccaacgccgccgctcagagcgcgccaggtgttgttaccaaaggcaaccaccgcaccaagatgcgcgtccgggaatttcgcttcaaaagttgccagtttgtcggcaaatgttttactggccgcacgcagggcgtcaacttcccctttcacgttggcttcgatccaaatcgccgcgcggcaatgttctggcaaaatgccactctgaacctgagacattgttcctcctgaaaataataatgccacgcaatccgtggcattgttgagcgctattttacgtgttttttcgcggcggcggtttgttcagacgcaaattaacgccgccagataattttactgactttccagtttttcagggtatcgtccgaaggcattaacccttcaggaccacgccattccccgctgaactggtagctaatatgttgactgccttcggctttacattcgacggcacgattatcatcaccatcagctttttggcaattgccaaatgctttgctgtaaaggtcgctaaacggtgtaccgattttaacaccggtgtcagcaggaatatcgctatccagcacgtcaatgcgactgatcgtgccttgatcgccgttaatcaccatcgccacgttgtcgcccttcatcacttcaaaaaagcgcaccacgttgccgttcgcggttttcattccgctgcgcaggcgataatcgccatcaagcgcatcggcaatggcttgttcttgcagtggtgtggacgccgttaattcacccacgccctgctcgctcactttggtggacgacccaaaccagttccacgggttagcggcagaccagttaactgacgacatcgtggaacagccggtcagcatcaatggcatagcgcataacattaaacgcagcgatttcatgtcacttcctttggttattcaataacgttgcttggagtgcaaattcaccaaaaagtgccgttattcttttacttcataaaaacaagcgcgtaaacgtcgattggtcagcagccagattaacgccacaatatccgccactaccagcgccagaccgataccgctaacggattcaccgttcagccacagccacggttgccagcaaagtaaaaccacctgcgccaacagcaacagaaaatagagtacacgccaggtgcgaggaaacgtagcccgccgaccgctcaacaaaaacgccagcaccgccggaatgccaggaatcagccccagccagaaattatcgtgatcgggataaaacagatttagcagcgcagtaccctgctcgcgcgacgcaccggcaatgacaaacagcacccaggttcgcgcctgaagcaatagcacaagccagaagagcaagggtaaacgcaggcgaccgtgcgcatcataatggacaggatgaaactcagtactcttcatcttcaatcaaacgcttacccagactcagcacgtcggcgtgttcatatcccaggcgttcatacattccgagcaccatgtcgttatcttccggcacattgatctgaattttcgggcagccacgagcaatcagctttttctccagccgattaagcaacgcattggcaatcccacgcccacgaaactctggatgcacgccaagataataagcagacccgcgatgcccgtcataaccgcccatcaccgttccgaccacgtcaccgtttacctcagcgaccaaaaacaaactgacgtcatggttcatcttacgctcgatgtccatttccggatcgttccacggacgcagcaagtcgcaacgctcccaaagggtgatgacctcttcgaaatcttcctggcgaaatacgcgtatctccatggtattcgttacctttttgcgggttaaaaggctgattatggcgtgaacggtcgaattagccaatatctgacgaaaatcggttgaaaaagtggcataatggggagttgtcaactattgaaatgaaaagtaaaacaattctcaacagcaaaccgtcgtaacggattacgcgatacgatataacatctggaactttattattacaactcaggccgtatgagcacttttaaaccactaaaaacactcacttcgcgccgccaggtgctgaaagccggtttggctgccctgacgttgtcaggaatgtcgcaagccatcgccaaagacgaacttttaaaaaccagcaacggacacagcaagccgaaagccaaaaaatctggcggcaaacgtgtcgttgttctcgatccaggtcacggcggaattgataccggagcgatcggacgcaacggttcgaaagaaaaacatgtggtgctggcgattgctaaaaacgtccgttccattttgcgtaatcatgggattgatgcgcgtttaacgcgttctggcgatacgtttatcccactttacgatcgcgttgaaatcgcccataaacatggcgcagatctgtttatgtcaattcatgccgatggctttaccaacccgaaagctgccggtgcttcggtatttgccctctctaaccgtggggcaagtagcgcaatggcgaaatacctgtctgaacgcgaaaaccgcgccgatgaagttgccggtaaaaaggcgactgacaaggatcacctattgcaacaagtgctgtttgatctggtgcaaacagataccattaaaaatagtctgacgctcggctcgcatattctgaagaagattaagccggtgcataaactgcacagccgcaacaccgaacaagcggcatttgtggtgttgaaatcaccgtcggttccttcggtgctggtggaaacctcgtttatcaccaacccggaagaagaacggctgttaggcacggcggcgtttcgtcagaaaatcgccacagcgattgctgaaggcgtgatcagttatttccactggttcgacaaccagaaagcacattcgaaaaagcgataagttatgaaacccgacgcacaccaggttaaacagtttctgctcaaccttcaggatacgatttgtcagcagctgaccgccgtcgatggcgcagaatttgtcgaagatagttggcagcgcgaagctggcggcggcgggcgtagtcgggtgttgcgtaatggtggtgttttcgaacaggcaggcgtcaacttttcgcatgtccacggtgaggcgatgcctgcttccgccaccgctcatcgcccggaacttgccgggcgcagtttcgaggcgatgggcgtttcactggtagtgcatccgcataacccgtatgttcccaccagccacgcgaatgtgcggttttttattgccgaaaaaccgggtgccgatcccgtctggtggtttggcggtggcttcgacttaaccccattctatggttttgaagaagatgctattcactggcatcgcaccgcccgtgacctgtgcctgccatttggcgaagacgtttatccccgttacaaaaagtggtgcgacgaatacttctacctcaaacatcgcaacgaacagcgcggtattggcgggctgttctttgatgacctgaacacgccagatttcgaccgctgttttgcctttatgcaggcggtaggcaaaggctacaccgacgcttatttaccaattgtcgagcgacggaaagcgatggcctacggcgagcgcgagcgcaatttccagttatatcgtcgcggtcgttatgtcgagttcaatctggtctgggatcgcggcacgctgtttggcctgcaaactggcgggcgcaccgagtctatcctgatgtcaatgccgccactggtacgctgggaatatgattatcagccaaaagatggcagcccagaagcggcgttaagtgagtttattaaggtcagggattgggtgtaactccctcacccccactcccgcatccgctgatgcagcgtcagtgacggcttctcggaaaacagctgctggtaatccgtggcaaattgccccagatgccagaatccccactgcatggcggcgtcttttaccgtcatactttgcgaccacggacttatcagttcgcggcgtacggcgttcaggcgaatgcgtttcagccacgcgttcgggccaatgcctaaaatagcgtgaaacgcgttttgtagcgtgcggcggctgacatgcagttgattacacaaatccagcaccgtcaccggttcggacatgttttccagcacatattcacgggcgcgggaaagcaatcgacggtaactctgatgactgatgctttccgccgtcaccattggttgcgcttcttccagcatggcccccatcgccattagcaaattatcccccagcacttttcgcactgcaggctgatggagattttccggattctcgcaaaacgtcgccagcgcctgttggacaaagccccacagcgcggctttatgctgctctttcacttccagcgccgactggttacgcaacatatgtaatacccgatccgggttatgcaaaaagttagcctgccgggtgatgacatcttcagaaagcaccacgcccaggatcgtgtaatcatccggcgtgctcagttcaaattcagtgccaccagggcgggtggcgatttccgcgcttcccagacattgcgaaccgataaatccctgctcaccgcgcgtcgccggaatgccaaaccagaacgagttcggccagaccaggcacgactgacgcagcgccagaccggtgtattcacgaaaaacctgaatatcatcgagtagaatttccgtaaattcaccatgaaacttgcccggatgcagctgatcgtaaatctgctgccaggcggtaatcgttaaagcatgttcatagacatccgttgtctgtcgttgatgaacattatccacttcgaccttcggcgtgagcttcaggttttcgggtaagggttcatgataaagatggtgcaaattggctgtacgggtctttttcatgatgttaatgccgggtgttgtaggacacccggcacctccgacaggttaatggggcttgagacgataacgactactgcgtttacgtaacgtcccggcagaaaagagctgttcgagcgcatttctggctttttccagcggccagccaaagtgggcagccacttctcctgccgtcattccctgacgtactgatgttaacagcgccaacaactcgtcagcagattccgcgacgataactggcgcgtcgggttcccttacgggttgcttcggctggcggttaaagccagtaaccagccactgggtgtcatcgtctggccgaccgatctccttgcggctgatgacacgcccggtacgcatcgcggcagcacaacctgcgtccagcgccgcacgacacgccgccagatcgccttccaccaccagcgttaagcgaccagggtcaagcacttcgtgactgagcagacgaacgttagctgctttgagcatggcatccgctgcatctatcgcggcgaccatgccgtccacttccagcaatcccagtgcattgatcatcggcaacctccgttacgcacgctggattggattacgcgcgatttccagcactgcatcggtaaaggcgttacaggctgctttacacgctgcctggctaccggttaaaaatgctgccgagtagttggtttcagacggtggcgggacataggtcgccagctgtacgtcggcagacttcagggctgcatcaatgccataggtcgcttccagcggcggtgccaccagatacgccatcggatcgccaagcgtgatcccggcggttgatgagagataagaaccggtacgcgaaactacatgtgccaggaatgccgtatcttgcgcgtcattagcccactggaaagctgcgccattttcaatatgcgcaatcatcgcatccagacctgcacgcacttccgccgggtttggcccaccaagcataatcagcacttcaccggcagtcggtgacgggccgtgtgcagcgcccgcatatagcgagcggccatacaccacttccaccatcgcctgcttggtcgcttcatcagcggcaatgtaggtgacgtcatcggagtcggcagaaatcagaccgaggctacgaatatgcggcggcaatttcagttcacgcgcaaaatcggcgttaacggaggcaatcacccgcatagcggtgacagacggtcgaatcaaatctaaagctggcatgatgcctccttatcgggtcatgttgatgccggatgctttctgctccagcatacgtttcgccaaatccacaatgacggctgcggcttcaaccggcggcgtgccgccctggtgaatgttagagatacaggtgcgatcggcctcaacggtggtcgccatacgcggcgagtaaacggcgtagcaggagaggctttctgactgacccaaccccggacgttcgcccaccagcaggatcactactttcgcgccgaggatctcaccgatctgatcttcaatcttcacgcgaccataacgaacaaagaatggtgtaccgactttcagcccggcctgtttcaggcccgccatcagcggtggcaggatctcttcgtagttcacggtgatcgcatcagttgacaggccatcagaaataacgacctgtacgtccggattggcaacacactgcgctttcagcgcttcaacagcttctgcacacaggcggcggcccatatccgggcgagtcaggtagagatttttgtcgctaatttcagagcgtacttccagcaagccctgcgctttcacccactcttccggcacttctttcagtacggtatctttcgaacgagagtgatcggccaggaaacgcagcagcgcctgcgtacgtggacgcggaccggcacgaccggtacaaacgcgggccacggtgctgcggcgcagttctgttaatacgtctgcgcgatgcggattttcaacaccaatccacgcttttgcttcagcggaacctaaatccagcgcacagctttccgaggtcaccggtgccgcacagttggtggtggcgcactttgcttctgacggcgcgggggccgcttgtcccattgacgccatcacgctgcgtacaatttcttcaatctgtttttgatccatgatatgttatctccgcgtcatcagaagaacagtgacggatcgcccgcccgtttggtcaggcgaccgtttgccataatgcccatgctttccagccagcgttcaaactccggtgacgggcgcaggttgagtaactgacgcacagtggcggtatcgtggaatgcggtggtctggtagttgagcatgatgtcatcacccagcggcatccccatgatgtagttgcagcctgcggtggcgagcaggatcatcaggttttcgttgaggttctggtcagcgtcagcgtggttggtataacagcagtcacagcccatagagatgccgctcagcttgcccataaagtgatcttctaagccagcacggataatctggcggtcgttgtagagatactccggcccaataaagccgaccacggtgttgacgataaacggatcgtaatgacgcgccagcccgtagttacgtgcttccatcgttacctggtctgcgccgaagttagcgccagcggatagcgcagagccttgtccggtttcgaagtagaggcagttttccccggcgatacggttgaactccgcgcccactgcgcgcgcttcgtcgagcatcgccagctccacgccaaactctttcagccctttttcgctgccacagatactctggaaaatcagcccgcccggtgcgccacgacggatcgcttcgatctgggtggtgacgtgcgccagtacacagccctgagttgggatgttgaatttgtcgatcacgccatagatggtatccaacacgcggcttaagttttccacgtcgtcagtcaccgggttaacgccgatcaccgcatcgcccaccccgaaggaaagcccttcgtagatttgcgcggcgatactttgcacgtcgtcacgggtgtcatttggctgcaaacgggcgctaaaggtgcccggaataccgatggtggtattggcctttttgattaccggcattttcttcgcgccgtagatcaggtccgcgttggagcaaatcttcgctaccgccgcgaccacttccgaggtcagccctttgcgggtaaaggcaatgtcgtccacgctggtttcatcgctcagcacatactcacgcagttcgctgatgctccagtttttaatctggttgtaggccgtttcgttaacatcgtcctgaatcagccgcgtcacgcagtcatcttcataggcaatcaccggattattgcggatgtccgctacggtcatttccgacaacacctgctttgccgccacgcgctcctgtgagcttgccgctgcgacgcccgccagcacatcccccgaacgcagttcgttggctttagccagcacctcttttacatccttaaactgatatacattgccgaacaatgtggtctttagtttcataagtcgttccctcaggaaggaaatgcgagtgatttcaccgtcaccggcacaaccgatccgccaaaaagaggcgtaccaatgtcgatatagtcccccgcgcggacaatcacttcgtcaatgactgccaacgggagttgttgtagctgtgggcgcaacaacatgcccagagctttaccaaagtcctgcccggccaccaccagcaggggatgcggattcggaaaacgcgcgacgaaatcgaccaacgcgttgatgaccgtcagtaccgcggcgtaacgcacaggcagcgaggcgggaagcgccagcacgtacgcgtcagttttgggatcaagatccagctgaatcagcgcctgttgccaggcccccaccagatccgtttcatcaatcgggatcgccaccggcaaattgcgcagcggcagttgtacgccctcaagccagattgtgctgccagagagcgaaagggtatgcgcgcccgcgccaatcaccgtggcgcgcacggtttgcgccggaaactgtacgttcatctcacgcaggcgcggatggtcatgcagcgcagttgccagcagcgggccaatatcggcaaaacagaacgggtcggcgggctggtggcgataacattcgcccacgccgccagaaagcgtaatgatttcgggcgtaacacctgcgggcagcaaaccggtttgcatcaatgcctgcgcgagcggtgagagcgttccgtcaatcacttcgacaatcagttctgccatccgccgggtcacctgcaccagctgcgcgccggtcagcgaacgggcgtcggtgcctgcaccgaagcactcatccacaatcatctgccccggtttatgagcgtaaaccacgcgcccgtggctgtcggtttccagcaggcgaccaccgacgttgaggcaggcagtgccgctgatttttccggcatcgaacagggcgtagttcgcggtgccaccgccgatgtcgatattcagtacccgacacagccgttgttcagaaagggtttgtgccccggctccgtgaccggcgatcacggattcgaggtgcggcccggcgctggcaacgacaaaatcgcccagcgactgagagagcgccatcaccgccgggcgagcattgcgggttttcgcgctttcaccggtgatgatgatggcaccagaatcaacgctttccggctcaatacccgcagcatgatattgctcgagtattaaggttttcagttccgcttcttttaaaccgccctgtttatcgacaggggtaaagaacaccggactttgccagctaatttcgcgtttaatgaattcgtagcgcggcacctgcgacaccgccgcacggttaaccagctccagccgggagaaaatcacctgggtggtggtggtgccgatatcgataccgacgctcaatagctggcgagtgttcacgattgtgcctccgcttcggttttagtcgcggtcgcgtcttcttttggcaccagcatcatcgccacgccaatcgccgttacgccgccgatcaacttgccgacaatcatcgggaagatcatggcgttcatgttggcagcggcgaagcctaagtggtcgcccagggcgaaagcagcggaaacggcgaaggcgcagttgatgactttgccgcgggtatccatctgcttcatcatgccgaacatcgggatgttgttggcaagcgttgccaccatgccggctgccgcgatgttgttcatattcagtactttaccgacgctcatcagcggtttttcaaaccagcgagtcagcagcagcaccatcggatacgcccctaacagaacgcaggagatagaaccgataacttcaatggcgcgcatcacctcaccgggtttatcgccaggggccataaagataggatccagaccggggatcagttcccagccaagcaggaatttcactaccgcagcggcaagaccgagggtgatcaatgcaacgaggaatttggcgaagatctggaagccgttgatcattttttccgggatgaatttcagccccagcgccaccagaatcgcaacaatgatcaccgggatcatgttcatcaggatcagggcgaaagtgaattccaccggctggccgttgatctgcacaccggagtacatagcaaccagaccaccagcgatacaaccaatcggaatggtcacaatgcccgccagcacgccgagcgccagataacgacggtcagaaggttcgataatgccgagcgccaccggaatggaaaacacaatcgttggccccatcatcgacccgagaattaacccagagtatagccacgcggctacgtcgccgcccgccagctctttggcgaggaagaagccgcccatatcgcacgccagcagtgttccggcgaacatcgatgggttagcgccgagcatttcgtaaaccggaataattaccggcccgagaacgtgagccagtaccggtgccagcgcggtcataccgaccatcgccaggcccagtgcgcccattgccataaagccttcttcgaactgaccgcctgatccttcgatacttttaccgaacttaccgaggaaacgagcagaaccgccgaactgcgacaggatcctgtctacggcagctatcagcataaagaacatcatgatgtacatgatgatttcgttaattcccatcgcctttactccctgttagttgttatttattggcggatgcggcgtaaacgccttatccgccctacatgtgcaatcccgtaggctggataagacgcggcaagcgtcgcatccggcaattgcaccgcgccactggcggatgcggcgtgaacgccttatccgccctacatgtgcaatcccgtaggctggataagatgcggcaagcgtcgcatccggcatttattgcgccgctgcgtacaggccgacaatctgctccaggctggcggtacgcgggttactgcgcagacaaatatcttccagcgcggcctgcgcccatgcgccgtaatgcgcagatgtcgcaccaacatcgcccagtcgtttaccaatcccaacttccgcaatcagctcacttaccgcgttaatagcgtcacgatcgtcggattttttagttcgcagtgcccgaccaatctgactaaagcgttcacgacaaaccatccggttaaattccatcaccgttggcagcaacatggcgttcgcgagaccgtgcggaatatgcagcgccgcgcccggctgatgcgccatcgcgtggcacaacccaagacccgcactggaaaacgccattcccgccatacatgaagccagcaacatgctctcgcgcgcggcaaggtcgtgaccgtagcccaccgctttcggcagcgatttgccaatcatcgcaatggcaccaatcgccagactgtcggtaaacggtgtagcgttcagggcgctgtatgcttcaatggcatgggttaacgcatcaatgccggtcatcgccgtgacatgcgacggcacaccttcggtcaatgcggcgtcgaggatcgccacatccggcatcagcgaggcatgggctaacacctgcttgcgcccgctcaccgcgtcgataatcaccgttacattggtggtttcagagccggttccggcggtagttggaatggcaatcagcggcaagcgcggttgcagaacgctggtttctgacatctctgccagcgtgctatccgggttcgtcaccagcaacgtcacggctttcgccgcatccagcaccgagccgccgccaaacgcgatcaccccatcacagcctgactcacgcaactgcgccacggctgcacacacgtcggtaatgcacggttcgcccaccggacatggccagagcgtcatggcgatacctttaacggtcaggctacgcgtcagcccggcggtcatccctgcctgatgcaaaaagctgtctgccatcacgaacagatgtttcagcccacgcgtttgcgcttgctgtccgcaactgctcaccgagcccggaccgcaaagcgtcaccggtggaacgctaaatgtttttacccgttgcagattcagggtatcgaacgcctgaaagagcgcggtctgcaattcattttgcatatagcccctccgctttctctcgcccactactggcgatcgccagcggggtcataaacaaactgtgctgcggtaaatgcacctgtaacgccgggaattgtttgcgaaacagttccgccacgcccggttgcatacaagagccgcccgccagccataaatcagtaatgccctgcccttcaatatgccgggcgacaatgtccgccattttttcgtacaccggtttcaccgcaggccaaatctcttcaccgtgaccgcgcttgtactgctccgcctcttccagcgaaatacggcgatttccggcgagagtcagagagatgtgatgtccgccggtggcttcatccgccgagtacgtcaccttgccctttttcacgatggcaatgccggtagtgccgccgccgatatccactacaccggcgttgtccagttgcagcagatccgcaactgcggttggctcatccagcacatggctcacttccagtccggcagattccagcacgttgatggaaatacgcgggtccgtacctggaggaaatgaagtcgccgcatggctaaaacgacgaccgaattgctgctcgagcgtgtcgagatggcgacgaacaatggtgacagcgccgaagaaatcccagacgatgccgtcgcgaaccacatcggcccagtcgaggcataccgccactggctgaccgtcgcggtcgacaaccatcgacaccacatcgcaggtgcccagatccacccccagccacagcggagattccgtcgcggcgggcgtctggttacacagcgttgccgccgtttgcagacgtggggtgagccattgttcgtcgtgcgccatctgttactccttaaacaatgcgaaacgcatcgactaatacacagcgacgcagacggacaaacgtacgcgcgctggttaccccttcaccggttggcgtggtgatggtcatggtggtccagccttccccgcccagccccagcccggcaatgcacggtccgttcttaacgaaaatgctggtatcaatagcattcgccatctggttcatgttttcgatgttgcgcgagtgcattgccgccgtgtggtggcaaccgccttccagtttcaccgctagcgcaatggcatccgccacgttggcgacgcgcacgacgggcaacaccggcatcatcagttcagtcacggcaaacggatgttctgcggtggtttccacaaacagcaggcgcgtttcttgcggaactttaaggccgattgccgccgcgattttgcctgcgtcgcgaccaacccagtcacggctgacggtgccttttccgcgctcgtcgatatttttcagcaacaccggttgcagctgctgcgcctgttctgcggtcagtttcaccgcgtgctggccttccatcagacgcatcagttcatcggctacgctatcaacaacaatcagtaccttttcgtcggcacaaatgatgttgttatcgaaagaagcgcctttgacgatggactgagcggcacgggcgaggtcggcggtttcatccaccactaccggcgggttgccagcgcctgcggcaatcagacgtttattggtgtgtttacgcgccgcttctactaccgcttcgccgccggttaccaccagcaggccgatacccggaaacttgaacaagcgttgcgcggtttcgatatccggatttgccacagtaaccagtaagttttccggcccacctgcggcaacaatcgcctggttgagcagcgtaatcgcccgctgggagacttttttcgccgccggatgcggggcaaaaatgacgctgttgcccgcggcaatcaggctgatggcgttgttaattacggttgccgccgggttagtggaaggcgtcaccgaagccaccacgccccagggtgcgttttcaattagggtcaggccgttgtcgccagtcagcacttgcggagagaggcactcaacgcctggtgtgccgcgcgcctgagcgacgttttttgcaaatttatcttcaacgcgccccatgccggtttcactgacggcaagttccgctaaatctctggcgtgtttttcgcctgcttcacgaatggcagcaatggctaactggcgcattgccacgctttttaacccttgctgggcgactttggctgccgcaacggcgtcatccagggacgcgaaaacgcccatctcatgaacggcggcggacggcgtgtcactgctttgcattttcagcagtaccgctttcaccacctgttcaatatcctgttgattcatgatgttctgccttatttgtggaaaattacctgaccgccagacaccacctcatcgacaatgccaatcacgcacagatcgaccggtgacgtttcgcttttatgcgcctggcgggcggaactgccactcaccagtaacacccactccccggttcccgcgccaatattgtcgatggcgacggcgcattgcccgtcaggattaccttgtggatcaatcatttccaccatcagcaatttgtcatgcgccagtccgtgatggcgtacggtacaaacaatttgtccagtgacgactgccagtttcatacccgcctccgtggcgtatttcaggtaaaagctccccctaccctccgcagaaggtaaaatgaaaaaggagagagcgtgacgcccgaatcgacgtcacacagggtgattacaggttgctgctatcgcctttcaggccgatcgggaagacttcttccaggtcgccgtgcggacgcgggataacgtgtacagataccagctcgccgatacgctgtgccgctgcggcacctgcatcggtcgcggctttacaggctgcaacatcaccacgaaccatggcagtacacaggccgccgccaatctgcttaacaccaaccagcttgacgcgcgcagctttcaccatcgcgtcagaagcctcaatcagtgcaaccaggccccgggtttcgatcattcctaatgcttccattgtgctttcctctttatcagggtccagaacgggaccgttcattcaaccagtgtttgtaaactgctttcgcggttcacttctgtctgacgcggcacagctgccaccagcgccagctcgataatttcctgcacgctacaaccacgagagagatcgtgcatcggcgcggcaagtccttgtatcagtggcccgacggcacgatatccgccgagtcgttgtgcgattttgtaaccaatatttccggcttccagcgacggaaaaaccatcacattggccttgccctgtagcgggctggcaggcgctttttgcgccgccacttccggcacgaaggcggcgtcaaactgtaactcgccatccaccaccagctttggtgcgcgctcacggacgatttctgtcgcctgctggacgttagcaacacaggggtgacgggcgctaccattgctggaaaacgacagcatcgccacgcgcggctcttctccggtgatggcgcgccaggtttcggcactggcaagcgcgatatccgccagctgcgccgccgtcggctgtggcaccacgctgcaatcggcaaagcccaacgccgggccgctgtactgtggcaacatcaggaaaatggaagagagcgttttacagcctggctgcaagccgataatgcgtaatccggcacgcagcacatttgccgtggaagagaggttgcccgcgatacagacatccgctttaccggcgctgaccattgctgcggcgaacatcagagggtcggtaagtttttccagcgcatccggcggcgttttttcgcccgcgcgggccagccagcgatgagcaaattcttcccgcattgcgaggttgccatgcggatcaatcacctgtagcccgtccatcgccacgccgtgactgagcgcaaactgacgaagttcaaacggattggcgaccagaatgggcgttgccagaccttgttgatgtaaatattgcgcggctttcagcacacgttggtctaacgcatccggaaaaaccactctggcgggcgctcgcaacgccagttcacgacaacgttcaataatcattgcgtttcccccagtcgttgttggatctgcttcaccgttagcggctgcttcgttacgctcaggatcatcatcacgtagaccgtgctcgaaaggcggttcagcgcctgcaaaatgtccgggcgtaatacttcaaagctgcgggtgataaagacctgcgccgctacggtttcggtttcccgcactttggtgcgtagcagattgagcaacgcagcatcgcgcccgtggctggcttccggcaccagatgatcgtggtcgagatagcgcagcggctgatgagaaagccgatgcagatcttcgtcagaaagcccgacaatcgcctggcagcccagcggttcccccagcgcatcggcgcgcataatgttgccaagacgcgaacggatatccgccagccacggctgccacggttccgccagttcaatttgcagccacactgccagcgcaatggtgctgtcgagaaccgcgcgaaaacccagacgcggatcgcttttggcgaccattttttccgccgacaggtgagtcagcgtatccggcttttttgccaccggctggcgacacagttcgcagcacgcctgcggatgttcatcgctactggtcagcccatgaacgggctgcggctgctgctgttcatcgtcaacaaacaggcggccctgctcgtcaataaacttgatgcgcagatggcggctttccagcaactcccgggcagagggcgtcaggcgactgtccgcagggagatggatctctgcgccttcgctgagcgtatggttcgctcttagccatgcttcggtgatgaaatctttcatagggattgccagttagccggccaggcgacatacaggaatttcacgctggatgtcgtaccaaattcgatgctggagcctttcgggataaacatcacgtcgcctgctttggcgatcatggtttggccttcgtggcgaacatgcagctccccttccagcaccatgtcgatttcgtcgtagttcagggtccacgggaagaatgcgttctcccactgcataaaaccggcggccatgctgctgccgtcgtctccggtcacaagatcagtcaagcccacgcaatgcggctctgcgccgtcgaaacgaccaaacttgacgctactgccatcaatcactttgatgccgcctttgccggtcaccgatttgaagctcggctgcattgcgccctgctccagcgactgtttttccttcatcactttttccatcagctgtgcgaccaggctttcggtaaactggccttccggcagctgggcaatgatggtttcgcggatgcgctggctttcggttttgtcggctggcacgctggcgggcacggacgccgttaccgggatcgattcatcacattcggtgatggtaaaacccagtagatccgccacttcacgggcttccggggtaataatgctggcgcgcagaaccacggacattgcctgttcgccgcgcgcgtgtgcttcacgaatatcattcgctgtgatgagttttttcacctgcttcctcctgtttggtgagagatgccagataatccaccagttgctgcacgctttgcgggtcgtggctgtttagctcgaacatcggctcttcgaaacccgtctcaagcaataactttcgcgttgcggcgacgtcagcatctggcatgtccgttttactgatgacggcgatttgccgtttgctgacgccaatatccagcaacccggcaggcaaccgactttccgggtcatttgcgccatggacatagatcagcatgtctacatcctgtagcgtggtaattaaggcgtgataccagcggggatggttaaaatattcacccggcgtatcaatatcgcccttatcattaaattccacggcctgtgtttttctggcgagggtataattcccctgcaacgcattaaataacgttgtttttcctgccccgacgctacccacaaacgcaattcgtttcatgaatgcctcgtattaacttttggtcatttcacaaagcgtataatttaataagcgacctaaaccgctgacggtttgtgataacgcttcttctactgcgcccaccgagccataaatcaccaatgcaccgctgaatcggtcgagaaaaccgatatgcacatcagcggctttcagcgctaaatcaccggcgatcatcgccgtttcgccgggagttagcgtcataatgccaattgcgcccgcatccggaacgccgattttcttcgccagttcctcaccgggatgcgcgatgagatgcgccagtgtgacctgtttgccgggcacaaattcctgaatgatgcgttctttatccatgagtcgccgcctgtgaaaaactttcgtgtatcgtgacaatttttcgtcagagtaaataacaaaattcggcaagcgcgtttaaaaggtgaggtagatcactaagaatggagagatattcgctgtggtgcataaactttcatatgcaacgcatgaatataaataaaataatatcgagatattatatagactgcttttttttattattcgcaaactcagtaataagctttactaatatattgcagctaaactgcttaccctgaatattcagggtaagcgtgagagttaaaaaaaattacagcggttgggtttgcgcttctaccacggccagcgccaccatgttgacgatacgacgcaccgatgcgatcggcgttaacacgtgaaccggtttcgccacacccatcagcaccgggccgacagtcacaccttccgagctggaaacacgcagtaagttgtaactaatgcgggcagcttccatgttcggcatcaccagaatattggcggaacctttcaaagagctgtccggcatacggtcgttgcgaatcgcttccaccagcgctgcatcgccgtgcatttcaccatcaatcatcagttctggtgcacgttccctgaccagttccagcgcctgacgcattttgctcgacgacgggcagtcagaagaaccaaagttggagtgcgacaacaaagcaacgcgcggctcaataccaaaacgacggacagtttctgccgccatcaaggtgatctccgccagctcttctgcatccggttcatcattaacatatgtatcggcaataaaggtgttaccactcggcagcagcagcgcgttcatggcacctgcggtgtgaacgccatcgcgataaccaaagacatttttcaccacgctaaaatgttcatgataatcacccaccgtaccgcaaatcattgcatcggcttccccacgctgaaccatgatcgcgccgatcactgtcgggttactgatcagcgcccgctgcgcctgttcctgagtgacgccgcgacgcttcatgatctggaagtattcggtccagtactctttaaagcgcggatcggattcgttattgacgatctcaaaatcaacgcccgctttgatctgcaagcccagtttctgaatgcgcatttcgatcacgttcggacgaccgataaggatcggtttcgccagtcccagcgttaccagttcctgagtggcatgcagaacgcgcgcctcttccccttccggcagaacaacgcgcttcggcgctttgcgagcctgggagaaaatcggcttcataaacaggttggttttgtaaacgaactcagtcagcttgtcgatgtagacgtcgaaatcagcaatcggacgagtcgccacgcccgactccatcgcggctttagcgaccgcaggagcgatcttaacgatcaagcgcggatcaaacggttttggaatgatgtattccggaccaaagctcagatcctgatcgccatacgctgaagccaccacttcgctctgttccgcatgggcgagttctgcaatcgcacgtaccgccgccagtttcatctcttcgttgatggcggttgcgccaacgtccagcgcgccacggaagatgaacgggaagcacaggacgttgttcacctggttcggatagtcagaacgaccggtgcaaatgatggcatccggacgcacttctttcgccagcggcggcagaatttccggttccgggttcgccagcgccaggatcattggcgcacgagccattttcttcaccatttcctgggtcagcactttcgggccggaacagcccaggaaaatatccgcgccttcaatcacatcatcgagggtacgtttgccgtcatccaccaccgcatatgcggctttggtttccgccatgtttggctcacggccctgatagataacgccttttgaatcgcaaaccacgatgttatgtttttgcagacccagcgctaccagcaggttcatacaggcgattgctgcggcacccgcgccggaaaccaccatccgcacgtcggagatgtttttctccaccacgcgcaagccgttgaggatggcggcagtgctgataattgccgtgccgtgctgatcgtcgtggaataccggaatattcatccgctcgcgcagtttctgttcaatatagaaacattctggcgctttaatgtcttcgaggttgatgccgccgaaggttggttcgagcgcggcgacaacttcaataaatttgtccgggtcgagttcgtcaacttcaatgtcaaatacatcaatcccggcgaatttcttaaacagaacgcccttgccttccatcaccggtttgcctgccagcgcgccaatgttgcctaaccccagcaccgccgtaccgttagagatcaccgccaccaggttacctcgggcggtatatttgtaggcttttaacgggtctttttcgatttcaagacaaggtgcggcaacgcctggtgagtaggccagcgccagatcgcgctgtgttgccagaggcttggttggagaaacctggattttccctggaactggaaattcatggaaatcaagtgcactttgttttaactggtcatccatttggttgttcctttcacgtaacgttcacaaataaagtgtgtgggcaacagcccctgcccacaacgtggcgcacattattaccctgccggagtctacagactttgagcaagtccaaactctcaccattaatataatgttttggtaataatcctataacactgatgttacctgcttaatccagcaataccatgcctgtctgctatgcttttttgatgcgtttagcgaaatttctcagaagtgtgaattaacgcactcatctaacactttacttttcaaggagtatttcctatgaacgagttagacggcatcaaacagttcaccactgtcgtggcagacagcggcgatattgagtccattcgccattatcatccccaggatgccaccaccaatccttcgctgttactcaaagctgccggattatcacaatatgagcatttaatagacgatgctatcgcctggggtaaaaaaaatggcaagacccaggaacaacaggtggtcgcagcgtgtgacaaactggcggtcaatttcggtgctgaaatcctcaaaatcgtacccggtcgcgtgtcaacagaagttgatgcacgcctctcttttgataaagaaaagagtattgagaaggcgcgccatctggtggacttgtatcagcaacaaggcgttgagaaatcacgcattctgatcaagctggcttcgacctgggaaggaattcgcgcggcagaagagctggaaaaagaaggtattaactgcaacctgacgctgctgttttcttttgcacaggcacgggcctgtgcggaagcaggcgtttttctgatttcgccgtttgtcgggcgtatttatgactggtatcaggcacgcaagccgatggacccgtatgtggtggaagaagatccgggcgttaaatcggtgcgcaatatctacgactactataagcaacaccactatgaaaccattgtgatgggcgcgagcttccgtcgcaccgaacaaatcctcgccttaaccggctgcgatcgactgactatcgcaccgaatttactgaaggagctgcaggaaaaagtttcgccagtggtacgtaaattaatcccaccttctcagacgttcccacgcccagctcccatgagcgaagcggagttccgttgggagcacaatcaggatgcgatggcggtagaaaaactgtctgaaggcattcgtctgttcgccgttgatcaacgcaaactggaagatcttcttgccgccaaactataaaccagccacggagtgttatatgtcccgaaaagaccttgccaatgcgattcgcgcactcagtatggatgcggtacaaaaagccaactctggtcatcccggcgcgccgatgggcatggctgatattgccgaagtgctgtggaacgattttcttaaacataaccctaccgacccaacctggtatgatcgcgaccgctttattctttccaacggtcacgcgtcgatgctgctctacagtttgctacatctgaccggttacgacctgccgctggaagaactgaagaacttccgtcagttgcattcgaaaaccccaggccacccggagattggctatacgccaggcgttgaaaccaccaccggcccgcttggacaaggtttggcgaacgccgtcgggctggcgatagcagagcgtacactggcggcgcagtttaaccagccagaccatgagatcgtcgatcacttcacctatgtgtttatgggcgacggctgcctgatggaaggtatttcccacgaagtctgttcgctggcaggcacgctgggactgggcaagctgattggtttttacgatcacaacggtatttccatcgacggtgaaacagaaggctggtttaccgacgatacggcaaaacgttttgaagcctatcactggcatgtgatccatgaaatcgacggtcacgatccgcaggcggtgaaggaagcgatccttgaagcgcaaagcgtgaaagataagccgtcgctgattatctgccgtacggtgattggctttggttcgccgaataaagcaggtaaggaagaggcgcacggcgcaccactgggggaagaagaagtggcgctggcacggcaaaaactgggctggcaccatccgccatttgagatccctaaagagatttatcacgcctgggatgcccgtgaaaaaggcgaaaaagcgcagcagagctggaatgagaagtttgccgcctataaaaaggctcatccgcaactggcagaagagtttacccgacggatgagcggtggtttaccgaaggactgggagaaaacgactcagaaatatatcaatgagttacaggcaaatccggcgaaaatcgctacccgtaaggcttcgcaaaatacgcttaacgcttacgggccgatgctgcctgagttgctcggcggttcggcggatctggctcccagcaacctgaccatctggaaaggttctgtttcgctgaaggaagatccagcgggcaactacattcactacggggtgcgtgaatttggcatgaccgctatcgccaacggcatcgcgcaccacggcggctttgtgccgtataccgcgacgttcctgatgtttgttgaatacgcccgtaacgccgcgcggatggcggcactgatgaaagcgcggcagattatggtttatacccacgactcaattggcctgggcgaagatggtccgacgcaccaggctgttgagcaactggccagcctgcgcttaacgccaaatttcagcacctggcgaccgtgcgatcaggtggaagcggcggtgggctggaagctggcggttgagcgccacaacggaccgacggcactgatcctctcaaggcagaatctggcccaggtggaacgtacgccggatcaggttaaagagattgctcgtggcggttatgtgctgaaagacagcggcggtaagccagatattattctgattgccaccggttcagagatggaaattaccctgcaagcggcagagaaattagcaggagaaggtcgcaatgtacgcgtagtttccctgccctcgaccgatattttcgacgcccaggatgaggaatatcgggagtcggtgttgccttctaacgttgcggctcgcgtggcggtggaagcaggtattgccgattactggtacaagtatgttggtctgaaaggggcaattgtcgggatgacgggttacggggaatctgctccggcggataagctgttcccgttctttggctttaccgccgagaatattgtggcaaaagcgcataaggtgctgggagtgaaaggtgcctgatggtgattgccggatgctgattgccggatgcgacgctgacgcgtcttatccggcctacagcgtcttatccggcctacatgtcccgccattttgtttaacgggtgatccacaacgtgggccaggcgtctggcccatgccagttatcgcaggtgggttctgcggcgtaacgcaccaggcgaaaacgctgaccgtcaaagcgccagcgcgcctgaatgccacaatcgcttaatccgcgccctttcgctaaggtcaccagttcacgcgatttctcatcaaatgttgcgttcatcagttccagttcattcgtctcctgaccgttgttgaacggcaaacgcaaccgaaccgggcgcgaagctagtggctttttacgcgacacaatccatgccaaatcaatggtgttataggcccctgcctcacagctaatcatcatcagcgctttatcatcagtcagcgcagtgacattcacctcacgacgcaatggatcaagcgagcagcgcagaccattcatccgccagtttccataatccagcaaatcgttgcgttcttcgagtgagagtggcgtcggcgttgggttaaccaccgcgacctctttcagcgcaggcgcgggcggtacgctgagcggcggttcgtcccctttcttgatccacgcggtttcactgccaacgcgcttttgctgagcatcaataaacaacaacgctgcttttaagccactcagagaaatggtctgatcgccatcgcgtaaggtgattgccttcccttcctgaatcatctgcaaaaacgcggtgatggttgccgtatcatcggttactaataaccatggtgaaatccgccacttgtcaccacttaacgccaacggctcgccatctaacagcagccgtggcgctatctccccttctgacgcctccggcgacttcaatccgccgcgctcaatacgtaaaacggcatcggtatgcgccccggcgctgcggctcagggtcatcaccagtccattatgatcgcccgtattacgcgccacgcagaaattttggttattacaggtgacctgccagtcggaaaacgcccgttgcgctggtgccgcccacaccaaagacgtcggcaacaaagcgaaaaaaaagagaaggaaaatgcgatagcgcatggacggtacgaccccagaagttcaaacaaacagcacaagtcgtatcttcgttgcgcaggtagcgcggctcaatcggatttgtcggattgagccaataataaacaacgaaatattattgttatttttcagtccattaaatgtgacgtttgcaaatagttaagcaataacaccgtcttaccgtcacgtatctcgccggttttgatcatctccagcgcctggctgaacggcagctcgagcacttcaatatcttcatcttcgacaccgccaccggcgttagcgcgctgattgtcactgtattcggcgataaaaaagtggattagctcagtcacaccgcctggcgacatatacagttcaaataatttgcgcacttcacccacttcatagcccgtctcttcaatcgcttctttgcgaatacacacttccggttcgtcgttatccagcagcccggcgcagctttcaatcagctgcccgctttcattgccattaacccaggtagcgacacggaactgacgaatcagaaccacggtctttttcttcgtgttgtacaggaggatcgtcgcaccattgccgcgatcgtacacttcacgtttatggcggataacttcgccgtctttgcgcgtgagatcgtaagtaatgttgtgcagggtgaaatagttatcggagagaattttgtctttaatgagggtgatttgttgcgtcataccgactccacagcgcgaaatgaacaattatcttacgctgtgaagtcgggtttgtctgcgcaggctatcagtgagatttgactgattttacccccagccagtcaataatcccctgtgccgcatgacgtccttctgccattgcggtaaccaccagatccgcaccacgcacggcgtcaccaccagcgaagattttcggattggtggtctggtaacggtactggctttccacatccgcgatgatgcggccccatttgtctaccgttacaccgtgcgactccagccacggcatcccgtgcggattgaagccaaacgccataatcaccgcgtcggctggcatgacaaattcactgccttccaccggcactggacgccgacgcccctgggcatccggctctccaagacgcgtgcgcaggaaacgaatcccgcagacgtgaccttgttcattcagctcaagcgccaccggctggacgttaaattcgaagttggccccctcttcgcgggcgttcttcacttctttcttcgagcctggcatgttagcttcatcacgacgataagcgcaggtgacgttactcgcgccgtggcgcagtgcggtacgcacacagtccatcgcggtgtcgccgccgcccagtaccacgacgttaagtccggcggtattgataaacggctcttccggtagctcttcgagccccatcacctgtttagtgttggcaatgaggaacggcagcgcgtcataaacgcccggcgcatcttcattgggtaaacccgctttcatggaacggtaagtgcctacgccaacgaagaccgcgtcgtattgttccaaaagcgaatccaaagagacatctttacccacttcacaattgagttcgaagtgaatccccatcgcgctgaagatttcccgacggcgtgccagcagggatttatccagtttgaaagaaggaatgccgaaagtgagcaagccaccgatttctggatggcgatcgtacaccgtcacccccacgccattgcgggtcagaacatccgcacaggccagccctgccggacctgcaccgataatcgccacccgcttgtccactttggtgacatggcttaagtcaggacgccaacctttcgccaacgcctgatctgaaatgtagcgttcaatgttgccgatagttaccgcgccgtgctcatcgcgaatagtacaggcaccttcacacaaacggtcttgcggacaaacgcgtccggtaatttccggcagggtgttggtctggtgagaaagctcgacggcggcgtcgatgtttccggctttcaccagttcaatccactgcggtatatggttatgcagcgggcaggtccattcacaaacgctgtgctcgccgcacttaaggcagcgcgaggcttcccgttgtgcctggtcggcgcgaaatggcagataaatttcatcaaaaccggttttgcgcgcttcaatcgccagtttatccggctcgccacgcgcgggcgttgcctgcatttgttcgactttactcattaccggcatttcttgcgccgcggtactggcatgccacggttgatgttcctgacgcgcggtgcgcaagcggcgggatttcgccatgccggagagtgcgacgtcagtgaccagttgcagcgcgtccgccgggcaattctcaacacaggcaggaccgttttcgcgccccgcacaaaggtcgcatttatgcgccgtggcttttacttttcctgccgcgacgggtgtcaggacgatttgcatcgtaccaaaaggacaggccaccacgcaggatttacagccaatacacttttgctgattgacctgaatgctgtcatcaacgtggctgattgcgccattagggcagctacgggcgcagggcgcatcttcacaatggtgacaggtcactgcactacgttgctgttgatgtttgataaccgtaattcggggatgaaaatggtgttggctcaggacatgttgctcatcattgtgagccatgacacaggcgatttcacaagcatgacaacccagacattgctgactgttggccataataaaacgattcataacgaccttcttttttggttgtaaaaaccttattctttatatgagtgttgttattacccgacttacaggggaatcggcaatgttcatgtgcccagaataagtaactatttcgctataaactgtggcagatcaaataatcccatcactgactaaattgcgtttcagcgaactggaacattaatgattttttgtggagaagacgcgtgtgattgttaaacgacccgtctcggccagtctggcccgggcctttttttacattgtgctgctgtcgattctttccacgggtatcgctctgctaactctggcgagcagtttgcgcgacgctgaggctatcaatattgccggatcgctgcgtatgcagagttaccgcctgggctacgacttgcaaagtggcagtccacaactcaatgcacatcgccagttatttcagcaggcactgcattcaccggtattaaccaacctcaacgtctggtatgtgccagaagcagtaaaaactcgctatgcgcatctgaatgccaactggctggagatgaataatcggctcagcaagggcgatttgccgtggtatcaggccaatattaataattatgttaatcagatagacctgttcgtactggctttacagcactacgctgaacgcaaaatgctgctggtggtggcgatttccctggctggcggcatcggtattttcacgctggtcttttttactttgcgccgcatacgccatcaggtggttgccccgctgaatcagctggttaccgccagtcagcgtattgaacacgggcagttcgactcgccgccgctggataccaacctgccgaatgagcttggtctgcttgcaaaaacctttaaccagatgtcgagcgagctgcataaattgtaccgttcgctggaagcgtcagtagaagaaaagacccgcgatctccacgaggccaagcgtcgtctggaggtgttgtatcagtgttcgcaggcgctgaacactagccagattgatgtgcattgtttccgccatattttgcagattgttcgcgacaatgaagcggctgaatatctggagttaaatgtcggtgaaaactggcggattagcgaagggcaaccaaacccggaattgccgatgcagattttaccggtgacaatgcaagagacggtttacggcgaactgcactggcaaaatagtcacgtttcatcatcagaaccgctgcttaacagcgtttcgtcgatgctgggacgcggtttgtactttaatcaggcgcagaagcattttcagcaattattgttgatggaagaacgtgcgaccatcgcccgcgaattgcacgactcgctggctcaggtactttcttacttacgtatccagttgacgttactgaagcgttcgataccggaagataacgccaccgcacaaagtatcatggccgatttttcccaggcgttgaatgatgcttatcggcagttacgcgagctgttgactactttccgcctgacgctgcagcaggcggatctcccctccgcattgagggaaatgctggatacgttacaaaatcaaaccagcgccaaactgaccctcgactgccgtctgccaaccctggcactggatgcgcaaatgcaggtgcatttgttgcaaattattcgcgaagcggtgctgaatgcgatgaagcacgccaacgccagcgaaatcgccgtcagttgcgtcaccgcgccggacggcaatcacacggtttatatccgtgataacgggattggtatcggtgaaccgaaagaacccgaaggtcattatggtctgaatatcatgcgcgaacgcgcggaacggctaggtgggacgctgactttttcacaaccttccggcggcggcacgttagtgagtattagctttcgctctgcggagggtgaggaaagtcagttaatgtaatgcctcctactgaccaaagaatacttgcacttaaggttcagtataaaagggcatgataatttacattaactcctttttttctccacgattggctcgtaccttgccgctacagtgaagcaagtcaagcctacaacgatacgcagaaacacgaggtcctcttttaatggcgaatttctttattgatcgccccatttttgcctgggtgctggcaatcctgttgtgtctgacaggtaccctggcgattttttcattgcccgttgaacaataccccgatctcgcgccaccgaatgtgcgagtgaccgctaactatcccggcgcatcggcccagacgctggaaaacaccgtgacccaggttatcgagcaaaatatgaccggcctcgataatctcatgtatatgtcatctcagagcagtggcaccggtcaggcatctgtcactttaagttttaaagcaggcaccgatccggacgaagccgtgcagcaagtacaaaaccagctgcaatcagccatgcgaaagttaccgcaggcggtgcaaaatcagggcgtgacggtgcgtaaaaccggcgataccaacattctgaccattgccttcgtctctaccgatggttcgatggataaacaggatattgctgattatgttgccagtaatattcaggacccgttaagccgcgtgaatggcgtcggggatatcgatgcctatggttcgcaatattccatgcgtatctggctggacccggcgaaactcaacagtttccagatgacggctaaagatgtcactgatgccattgagtcacagaacgcgcagattgcggttgggcaacttggtggtacaccttccgtcgataagcaggcgctcaacgccaccattaacgcccagtcactgctgcaaacaccagaacagttccgcgatatcaccttgcgggtcaatcaggacggctcagaggtaaggctgggcgatgtcgccaccgtcgaaatgggggcggagaaatacgattatcttagccgcttcaatggtaagccagcctccgggctgggggtaaaactggcctccggcgctaacgaaatggcgacagcggagctggtgctcaatcgtctcgacgagctggcgcagtatttcccgcatggactggaatacaaggtggcgtatgaaaccacctcgtttgttaaagcctccattgaagacgtggtgaaaacgctgctggaagctatcgctctggttttcctcgttatgtatctgttcctgcaaaacttccgcgccacgctgatacccactatcgccgtgccggtggtgttgatgggaaccttctccgtactttacgccttcggttacagcgtcaacaccttaaccatgttcgcgatggtgctggcgatcggtctgctggtggatgacgccatcgtggtggtggaaaacgtcgaacgtattatgagtgaggaaggactcactcctcgcgaagccacacgtaaatcgatggggcagatccagggggcactggtcgggattgcgatggttctttcggcggtatttgtaccaatggccttcttcggcggcaccaccggtgccatctatcgccagttctctattaccattgttgcggcgatggtgctgtcagtactggtagcgatgatcctcactccggctctgtgtgccacactacttaagccactgaaaaaaggtgagcatcatgggcaaaaaggcttttttgcctggtttaaccagatgtttaaccgcaacgccgaacgctacgaaaaaggggtggcgaaaattctccaccgtagcctgcgctggattgtgatttatgtcctgctgcttggcggcatggtgttcctgttcctgcgtttgccgacgtcgttcttaccgctggaagaccgtggcatgtttactacctcggtacagttgcccagcggttcaacgcaacaacagaccctgaaagtcgttgagcaaatcgagaaatactacttcacccatgaaaaagacaacatcatgtcggtgtttgccaccgttggttctggccctgggggtaacgggcaaaacgtggcgcgaatgtttatccgcctgaaagactggagcgaacgcgacagtaagaccggcacctcgtttgccattatcgagcgtgcaacgaaggcgtttaaccaaattaaagaagctcgcgttatcgccagcagcccgccagcaattagcggtcttggtagttctgcaggttttgatatggagttgcaggaccacgctggagcgggtcacgatgcgctgatggcagcacgtaatcagttgctggcgctggcggcggaaaacccggagctaacccgtgtgcgccataacggcctcgacgacagtccgcagttgcagattgatatcgaccagcgtaaagctcaggcgctgggcgttgctatcgacgatattaacgacacactgcaaaccgcctggggttcgagctatgtgaatgactttatggatcgcggtcgcgtgaagaaagtctatgtgcaggcagctgcgccgtatcgcatgctgccagatgacatcaatctctggtatgtccgaaataaagatggcggcatggtgcccttctctgctttcgcgacctcacgctgggaaacaggctcgccgcgtctggaacgctataacggttattctgcggttgagattgttggggaagccgcaccgggggtcagtaccggtacggcgatggatattatggaatcgttagtgaagcagctgccaaacggctttggtctggagtggacggcgatgtcgtatcaggagcggctttccggcgcgcaggctccggcgctgtacgccatttccttgctggtggtattcctgtgtctggctgcgttgtatgaaagctggtcggtgccgttctcggtaatgctggtcgtgccgctgggggtaatcggcgcgctgctggcaacctggatgcgcgggctggaaaacgacgtttacttccaggtgggcctgttaacggtcattggtttatcggcgaaaaacgccatcctgatcgtcgagtttgctaacgagatgaaccaaaaaggccacgacctgtttgaagcgacgctccacgcctgccgtcagcgtttacgcccgattctgatgacctcgctggcatttatcttcggcgtattgccaatggcaaccagcacgggtgccggttccggtggtcagcatgcggtgggtactggcgtaatgggcgggatgatttcggccactattctggctatttacttcgtgccgctgttctttgtgctggtgcgccgccgcttcccgctgaagccgcgcccggaataagcaataaaaaaggcgacatgccaatgtgtcgcctttttcaactttccgattaagaacctgctcagcgggttcttgctgtttgtactttgtctcaggaattacttacgaagcataacttcgataaagtctttccagttccccagttcacgttcaatcataacaacctctcttataattatgggtattctacggaaacaatataccgtggtgaagctaatttactcgattgctgcgatgactacctccgggggacaaatcttatgtaaatactatggtcctgcggtgatgatttgtatgtgatacacagcaacatttcgagatattcatacggcatctaatactgatttaattctggttaaaatacagacagataacaagatgaatattcttaatgtttacgttaaaaatgtttaatattatttaatagttgttaatttgaatacttcgataatgttatatttcctgataatcatttgcaggcaaaatgttttcacccttaaatgagtatttattctcataaatcgaaaaaggattcattatggttacactttacggtatcaaaaattgtgacaccattaaaaaggctcgccgttggctggaagccaataacatcgactatcgttttcatgattaccgcgtcgatgggctggacagcgaattattgaacgattttatcaacgaattaggctgggaagcgttactcaacacccgtggtacaacctggcgtaaactggacgaaaccacccgcaataaaatcaccgatgcggcctctgcggcggcattaatgactgaaatgcctgcaattatcaaacgtccattgctctgcgtgcccggtaagcctatgctgctgggtttcagtgattccagttatcagcaatttttccatgaggtgtagtctatgtcgtgcccggttattgagctgacacaacagcttattcgccgcccttccctgagtcctgatgatgcaggatgccaggctttgttgattgaacgtttgcaggcgatcggttttaccgttgaacgcatggactttgccgatacgcagaatttttgggcatggcgtgggcagggtgaaacgttagcctttgccgggcataccgacgtggtgccgcctggcgacgccgatcgttggatcaatcccccgtttgaacccaccattcgtgacggcatgttattcgggcgcggtgcggcagatatgaaaggctcgctggcggcgatggtggtggcggcagaacgttttgtcgcacaacatcccaaccatacggggcgactggcatttctgatcacctctgatgaagaagccagtgcccacaacggtacggtaaaagtcgtcgaagcgttaatggcacgtaatgagcgtctcgattactgcctggttggcgaaccgtcgagtatcgaagtggtaggtgatgtggtgaaaaatggtcgtcgcggatcattaacctgcaaccttaccattcatggcgttcaggggcatgttgcctacccacatctggctgacaatccggtacatcgcgcagcacctttccttaatgaattagtggctattgagtgggatcagggcaatgaattcttcccggcgaccagtatgcagattgccaatattcaggcgggaacgggcagtaacaacgttattccgggtgaactgtttgtgcagtttaacttccgcttcagcaccgaactgactgatgagatgatcaaagcgcaggtgcttgccctgcttgaaaaacatcaactgcgctatacggtggattggtggctttccgggcagccatttttgaccgcgcgcggtaaactggtggatgcggtcgttaacgcggttgagcactataatgaaattaaaccgcagctactgaccacaggcggaacgtccgacgggcgctttattgcccgcatgggggcgcaggtggtggaactcgggccggtcaatgccactattcataaaattaatgaatgtgtgaacgctgccgacctgcagctacttgcccgtatgtatcaacgtatcatggaacagctcgtcgcctgatgagtggttctgcaagaggaaataagcatggactggctggctaaatattggtggattctggtgattgtctttttggtaggcgtcctgctgaacgtgattaaagatctcaagcgcgtcgaccataagaaatttctcgccaacaagccggagcttcccccgcatcgtgatttcaacgataagtgggacgatgacgacgactggccgaaaaaggatcaaccgaagaagtaagctgagtgctcaaccgtaggccggataaggcgttaacgccgcatccggcaatggtgaacgatgcctgatgcgacgctcacgcgtcttatcaggccaggtaatctgtcttttacatcatttcaatcacatcatcatcgccaggcttaccgccacttagcgcttcgtcgaaataatgtttcggaatggtataacgcaagtgatccagggcaaattgcatactgcgattgtcgatcgcatggcctaaatcctccacgatatccagcgtcacgtcaccaccggcactgattaacgcttcctgcgccgcaaccgcatgcgccagatcgataaccggatcttcaccgccatgaatcaggtgaattgtcgtggctgtagacgcagtttccggcaggctcgcatagcgtccgttaaaagcaatgacgcgtgaagcaaggcccggttcggctttaatgctctccagcaccataatcgcgccttgagagaaaccgatgagcgccgtggcgttagcccctactccgctctgtttctgccagtagcgcaccgtttcaataaacgtcggcatgatcgcatccacacgcgcctggcgattatcttccgtaataccctgcaccgaaaaccactgacgccccgccggattaccgctcggctccgcgccaccgacactcaccaccagcgcatcaggaaacagcggtgcaaaccagttgcctatttcccccattgccaccgggttatccccgacaccgtggaaaagcagtaacaactgttgcgcaggtttatccgggctttgaacaacaaaatggtcatgtttcatggcgaactccttaactgatgtcattaattttacgccgctgactcacaatgaccatgagataaaattgaaggagtcagtgaaataattgccattgcgttatgcgatcgcgcagacgctcagtgcgaacatcattaagtgcgaacagcgcctgcgcggcctcttcccgctgacggaccagtaacatcttgcggcctgaaagtttaagtgtggtacataactgcgcatcactggcgtttttctgtaaacgcccacgcagcgccggtaatgccagttcactggtttgtaacagacgcaataagcaacctaacgacgttaatagcggacgatgagcgaaagcaaaaccggccagttcaagccagtcgtcgtcagaaaggacggcatcgtttagtggatcaacaggaagcgtttcgccattccactgcgcgagagcttgcgcatcgcgacgtaaacggtaatgctcacgttcagccagctgtttacccgcatcactcatcggtaacagcgccatcgccgtatagcaaccgctgctggcttcccgatgattacccatccgcaccagcacaaaaccgcagcgttgccagaaacgccataactccccggtgtaaccaaaactcaccgaaagatagtcgaggtcttgcgtatattgcaaagcaccagcaataagttgccgccctgtgccttcccgctgacgagccggatgaactgctatccggctgacccgccgtccacgcaatgtcgccgccagtggattgttgccgtgcgccgccagcgactgggccaccagattaccccgcgggcgacgaaaacctgcccataccgcctgactgagttgttgagataatccaccctcatccaccagccacagcgccccggcaatctcgttttcgccagccgcctgtaaaaaatgttgccctggtgcatccatcatccggcgtaaatccagcggcgaagtccgatagtgcgcaccagacaagagctgataaacctttaacggcgtttctggatcgctttgccataacgtctgttcaaatgcggaaatgacaatattgccttgtggtgtatgggtgaagttttcatcgtcaaaaaccagtgcctcgctgaccattttttccagcgggcatccctgcgcccagcggatcggctgttgcagttcaaaacggtgtaaatgcggaaagcgagcgcaaaatttcagcaaaaaaccacgtccggtgccttcgtagccctgcaccgtagtggttaacaacgttcgaggaaaacgcgataccagttgatgcaacaatggcgcaggtatggctgcggcttcatcgaccaccagccagtcggcttgctcatcgctggctaacaaggcatccggcgcaataaagcgaaacttctcgcccgcaaattgtgccagtacatccgttgacgcttttgcgggcgcggtgacaatcgctctgcccgcaatacgagaaatgagttgccctgccaacgccgacttaccgcgcccacgcgcagccgttaccgctgccacgcccggcggcatggtcattagctgctttaagagttgctgttgttctggttgtggtgcgccagtcgcggggtaccagtcagtacggggagtaaaatgcgccaacgagaatggctggttttgccgccagaggatagcctcgttatccgccgtaagtacgcgtttgagatgctggacaaaatgcggcgtcgcaatagggtcagggcaatcactccagcgcagcgagtcggcatcaggttggttttcccactcttcccatacagggagtaacaaaaccagccagcttcccgctttcaacgttccgctaagtgcggcaaaggcagcggcatcaaagccgtggcgggcgtcgaataccgcatgccggaactcgcgcccaagtaaagtttgtagtgccgagggagaacagtggttttcagcatctggccgcggcgaaatccacagccagtcgccaggtaaggcatcacgcaacttaagagtatgctcaaaacaccaaccctcttccccgctcaacaccagcaagcggcggatcccttcacgtttcatttgcgctgttaatgtgtgaagcgcagtcagttcagccatccctgccccggaagttaaatgcttttaccaaaagtattgcattgtgccggatcgccgctgtcgaaaccacgtttaaaccagctgtagcgttgctgagaagtgccatgagtgaaactgtctggtactactcgcccctgactttgctgttgtaaacggtcatcgccgatggcctgcgccgcgttcagcgcctcttccagatcgccggtttccagaacgccttgctgctgcatactatgcccccagacaccggcaaaacagtcggcctggagttccatacgcacagataagcggtttacttccgcctgcgtcgcgttttgttgcagttgacgaactttcggctcgatgcctaacagtttctgcacatgatgaccgacttcatgggcgataacgtacccctgggcaaaatcgccatccgcgccaagtttgtctttcatgtcatcatagaaggagagatcgatataaaccgtgccatccgccgggcaatagaacggccccattatggactggcccgccccgcagccggtacgcgtcattccacggtacatgaccagcttcggttgctgataggtcttacccatcttctcgaactgttgtccccaggtgtcttccgtggttgccagaatcaccgaggtgaattttgcggcttcgtcttcatttgggctaattgaccgcgttgattgttgttgggaaaccggctgcccggtcatcaacccggttaaatcaacaccatagtagcctgcaaccagcacgactatcagtaaaatcagcccgcctttaccgcttggcaggcgaaaaccgggaccgcccatagatggaccaccagagctgttgcgcctgtcttcaacattgtcactttcacgtcgcccttgccaacgcatagatacctcaacaatatattcattatagaaatgatcgtaggtggttcagaggaagattaccacaggaaagcgggatgaaatggcggaggaatgagcgttcaatgcatatattccgagagcggttgtcttgccgtgccagctgcacggcaagatgatgaacagaaaaatcagtccagctgtacacccaggcggcgggcgacggcttcataggcttcgatcaggccaccgaggctctggcggaaacggtctttgtccattttctccagcgtttctttgtcccacaggcggctaccgtccggggagaactcatcacccagtaccacttcgcctttgtacagaccaaattccagcttgaagtcgaccagaatcagaccagcatcatcgaacagttttttcagcacgtcgttcgctttgtaggtcagctctttcatacgcgccaggttctctttgctcacccagccaaaggtttcgcagtaagattcgttgaccatcggatcgtgcatggcgtcgtttttcaggaacagatcgaacagcggcgggttcagctcaataccttcttcgattccaagacgtttcaccagagagccagcagcacggttacgcacgacacactcaaccggcaccatatccagctttttcaccagacattcggtatcggagagcagacgctccatttgagtcgggatacccgcttcagccagtttgctcataatgaagtagttgaacttgttgttcaccatacctttgcgatcaaactgctcaatgcgcgcgccatcccctgctgacgtatcattgcggaattcgagcaccaacaggtccgggttttccgtgctgtatacggttttcgctttaccacgatacaactcagcttgcttttgcatctttatcactcctgggtgtgaattaacgttttaaaatcttttgctgtctggtgtgccggatgttttgtcggatgcggcgtgaacgccttatccgaactacgtccgacaaacaaatttcgtgcgaattaccgctaaaatcgcgttttcctgcagacgcacacgtttgcgtatcatatcagaaaaaagggccggatgattccagccctgtatttttacttgctaaacgcagcctggaagacagctaccagcgcgtcgttctgactctgagtcagagtatgacctttcggatcgatgaactgtaggctgctgcggttatctaaatcgccaacctgcagtttatagtcaccggatgccaggcctggatcgctcgcgcccagttcctgccagtcgctgtcagacagcggcttataagttacggccatgttgccctgcgaacgggtgctgtcggtcactttcatgcccactttttccagcgccgctggcagacgttgccaaaccacattgaacggcccgcgtacgaccagcattggtaaaccggtgtcatcagctgcactttgtacgtccatagtggtggaggcacgattttgcgcagcgttcgcggcgtcagtggcagatttatccagaccggcggaaataacgttcatcatctccgtgctgtaacgctgcatggaagccgcgtctgcaaccggtttgcccgcctgttccaggttcagcagtttaaccgtaaccgcctgctgataaccctgcggcttaacagagatttgataacgaccacgatactgctcgtcttcgtccagacggttccattgtacccaatcggtggtcagtgtctgaccagcatcatcacgttgggtgatggtgtagtttttcgcctgcagcacgctaaccacctgcggccacagagtattgccacgaccattttccaccagcaatgaagcggtatcgcccgtgaactgggtacgcgcgccagaaaccagtgccagcggctgggctggtggacgaatgtccagcgccttaccgacagcaccactaccgttggtcaccgggattgcataatcaccggaggtcaccggcaaaatcattccagccggggcatgaagctccgcaagcggtgccgcttccaggtaggcttcatcaccactgacctgacgcttatagcgtgagtcagaactacaggcagcgagtaataaaacaagcgaaacacccgcaacctttgccaggcgcgacttttgaacagagtaagccatcaaatctccctaaactttacagcaaaccggcatgcttaagcgccgctctgaccgtctcacgaccactgtcggtgattggtgtcattggcaggcgcagcgtatcggtcgccacaagacccagttccttacatgcccatttcaccgggattggattgggttcgacaaatagtttgttgtgtaatggcatcagacgctgattaataacgcgtgcctcggcaaaatgcccttctgctgccagtttgcacatctgggccatatcacgcgctgcgacgttagccgtaacggaaataaccccatgaccgcccaattgcatgaagtccagcgcgctcgcatcatcgccgctcagcagaacaaaatcatctgaaaccagctctttgatctggtttacacgcgttaagttccctgttgcctctttgattccgataatattttttactttcgccagacggcccaccgtttccgggagcagatcgcagccagtacgggacggcacattatacagaatttgcggcaggtcagtatgctcagcgatggctttgaaatgctgatacaaaccttcttgcgacggacgattgtagtaaggggttaccgtcaggcagccgacgataccactgtcattgaagcgctgcgtcaggctaatggcttccgcagtagcgttagcgccggtcccggcaattaccggaatgcgcccatcagccagatccagcgtcatcatcaccacatcagcatgttcgtcatgatttaaggtagcggactcgccagtggtgccaacagaaacgatcgccgaagtaccgctggcgacatgataatcaatcagttttttcaagctagcccgacagacattacctttttcatccatcggagtaacaatcgcgacaatacttcccgtgaacatgggccatcctctgtgcaaacaagtgtctcaatggtacgtttggtatggcattaaaagcaagcagacagaaccgttctgattgttgtatgcatgttttttttatgctttccttaagaacaactcaccccttaaaggaataaccagtttgacactgtcatcgcaacattatctggtgatcactgcgttgggtgccgatcgccctggaattgtgaacaccatcacccgtcatgtcagtagttgcggctgtaatattgaagacagtcgcctggcgatgctgggagaagagttcacgtttattatgctgctttccggttcatggaatgccattactctgattgaatcaacgttaccgttgaaaggtgccgaactggatcttttaatcgtgatgaagcgcacgacggcgcgtccgcgtccgccaatgccagcatctgtctgggttcaggtcgatgtggcagactccccgcatttaattgaacgcttcacagcacttttcgacgcgcatcatatgaacattgcggagctggtgtcgcgcacgcaacctgctgaaaatgaacgggctgcgcagttgcatattcagataaccgcccacagccccgcatctgcggacgcagcaaatattgagcaagcgttcaaagccctatgtacagaactcaatgcacaaggcagtattaacgtcgtcaattattcccaacatgatgaacaggatggagttaagtaatgaatccactgaaagccggtgatatcgcaccgaaatttagcttgccggatcaagacggagaacaagttaatttgaccgacttccagggacagcgtgttctggtttatttctacccgaaagccatgacccccggctgtaccgtacaggcctgcggcttacgcgataacatggatgagttgaaaaaagcgggcgttgatgtgctgggtatcagcaccgataaacccgaaaaactctcccgttttgcggaaaaagagctgcttaactttacgctcctgtctgatgaggaccaccaggtgtgcgaacaattcggcgtctggggtgaaaagtccttcatgggcaaaacctacgatggcattcatcgcatcagcttcctgattgacgctgatggcaaaatcgaacatgtctttgacgatttcaaaaccagcaatcaccacgacgttgtgctgaactggctgaaagaacacgcctgattactttgctccattccgtgctggctgcgcttgcggccagcatacctcacttctcgtgatcaagatcacattctcgctttcccctgcgacacgggtgtcgaatccattttttgctgaacgttaatgaccatcatttttgtaccgttcagaatccagttaatacataacttattgaatatattgagttaatcagaatggcatcctttatgcaatatgaaatgcaatgtttcatatcattttcaaggagccgacatgaaccgctttgtggtggccgaaccactgtggtgtacaggatgtaatacctgtctcgctgcctgttcggacgtgcataaaacgcaaggtttacagcaacacccgcgcctggccctggcgaagacgtcaacaatcactgcccctgtcgtgtgtcatcactgtgaggaagccccttgcctgcaggtctgcccggtcaatgccatctctcagagggatgatgcgatccaactcaacgaaagcctctgtattggctgcaagctttgcgccgtggtctgcccatttggcgcaatcagcgcttcaggaagccgtccggtgaatgcccatgcgcaatatgtttttcaggctgaaggctcactcaaagacggcgaagaaaacgcgccaacacaacatgctttgctgcgctgggaacctggtgtccagaccgtcgcggtgaaatgcgacctgtgtgatttcttgccagaaggtccggcctgcgttcgcgcttgcccgaatcaggcgttacggctgatcaccggtgatagcctgcaacgtcagatgaaagaaaaacagcgccttgccgcaagctggtttgccaatggcggggaggatcccctttccctcactcaggagcaacgctaatggatgccctgcaattattaacctggtcgctgattctctatctgtttgctagtctggcttcgctgtttttactcggtctggacagactggctattaagctttccggcatcacatcgctggtgggcggcgtgattggcatcatcagcggaattacgcaattacatgctggtgtaactttagtcgcccgttttgcccccccttttgaatttgccgatttaaccctgcgaatggatagcctctcggcatttatggtgctggttatctccttgctggtggtggtttgttctctctattcattgacttatatgcgcgaatacgagggcaaaggcgcggcggcgatgggcttctttatgaatattttcatcgcatcgatggttgccctgctggtgatggacaacgctttttggttcatcgtgctgtttgaaatgatgtcgctgtcttcctggtttctggtcattgccaggcaggataaaacgtcgatcaacgctggcatgctctacttttttatcgcccacgccggatcggtgctgataatgatcgccttcttgctgatggggcgcgaaagcggcagcctcgattttgccagtttccgcacgctttcactttctccggggctggcgtcggcggtgttcctgctggcctttttcggttttggcgcgaaagccgggatgatgccgttgcacagctggttgccgcgcgctcaccctgccgcaccatcgcacgcttcggcgttgatgtctggcgtaatggtcaaaataggtattttcggcatcctgaaagtagcgatggatctgctggcgcaaacgggtttgcctctgtggtggggcattctggtgatggcgatcggcgcaatctccgcgctcctgggcgtgctatatgcgctggcggaacaggatatcaaacggctgctggcctggagtaccgtcgaaaacgtcggcattattttgctggcagtcggtgtggcgatggtcggtctgtcactgcacgacccgctgctcaccgtggttggactgctcggcgcactgtttcatctgctcaaccatgcgctgttcaaagggctgctatttctcggcgcgggagcgattatttcgcgtttgcatacccacgacatggaaaaaatgggggcactagcgaaacggatgccgtggacagccgcagcatgcctgattggttgcctcgcgatatcagccattcctccgctgaatggttttatcagcgaatggtacacctggcagtcgctgttctcactaagtcgtgtggaagccgtagcgctacaacttgcgggtcctattgctatggtaatgctggcagtcactggtgggctggcagtaatgtgcttcgtaaaaatgtacggtattactttctgtggtgcgccgcgcagtacacacgctgaagaggcacaggaagtgccaaatacgatgatcgtcgccatgctactgctcgcggcactctgcgtattaattgcgcttagtgccagttggctggcaccgaagataatgcatattgcccatgcgtttaccaatacccctcccgccactgtcgccagcggaatagcacttgtacccggcacgtttcatacacaggtcaccccctcattactgttgctgttactactggcgatgcctttgctgcctggcctttactggctgtggtgtcgttcgcgccgcgcagcgtttcgtcgcacaggagatgcctgggcatgcggctacggctgggaaaatgcgatggccccgtcaggcaatggcgtgatgcagccgctgcgtgtggtcttttctgcgctatttcgtctacgacaacagctcgaccctacgctgaggctaaataaaggtcttgcgcacgtcaccgccagggctcagagcacagaacccttctgggatgagcgggtgatccgccccatcgtgagcgccacccaacggctggccaaagaaatacagcatctgcaaagcggcgactttcgtctctattgcctgtatgtggtcgccgcactggttgtgctgctaatcgctattgccgtctaaggaaatcaccatgagacaaactctttgcgacggatatctggtcatttttgcgttagcacaggccgtgattctgctgatgctaaccccactttttacgggtatttcccggcagatacgcgcgcgtatgcactcccgccgcgggccggggatctggcaggattatcgcgatatccacaaactgtttaaacgccaggaagttgcgccgacatcttcaggtctgatgttccgcctgatgccgtgggtattaatcagcagcatgctggtgctggcgatggccttaccactgtttattaccgtttccccttttgcgggcggcggcgatctgatcacccttatctatcttcttgccctgtttcgttttttctttgctctttccgggctggataccggaagtccgtttgcgggagtcggtgccagtcgcgagttgacgctcggcattctggtcgaaccaatgcttattctctcactgctggtattggcgctgatagcaggttccacgcatatcgagatgatcagcaatacgctggcgatgggctggaactcgccgctaaccaccgtactggcgttactggcctgtggttttgcctgcttcattgagatgggaaaaattccctttgatgttgctgaagcagaacaggaattacaggaaggcccgctgaccgaatattccggtgccgggctggcgctagcgaaatgggggctggggctgaaacaggtcgtgatggcatcactgtttgtggccctgtttctgccctttgggcgcgcgcaagaactttctctcgcctgcctgctgacttcacttgtcgttacgctgctcaaggttttgctgatttttgtactggcctcaatcgcagaaaacacgctggcacgcgggcgttttttactcattcaccatgtgacctggcttggcttcagccttgctgcgcttgcatgggtcttctggttaaccggtctgtaaggagcactgacggaatatggaaaatcttgctctgacgacgttattgctgccttttatcggcgcactggtcgtttcgttttcgccacaacgtcgggccgccgaatggggggttttgttcgccgcgctgaccacgctgtgcatgttgtcactgatctccgcgttttatcaggccgataaagttgccgtcacgttgacgttggtcaacgtgggggatgtggcgttgtttggcctggtcattgatcgcgtgagtacgctgattctgtttgtggtggtgtttctcggtttgctggtcacgatctactccacgggttatctgacggataaaaatcgcgaacacccgcataacggcacgaatcgttattacgcatttttactggtgtttatcggcgcgatggcgggactggtactctcctcgacgctgctcggtcagttgttgttttttgaaattacaggcggctgctcctgggcgttgatcagttattaccagagcgataaagcgcagcgttcagcactaaaagcgttacttatcactcatatcggctcgttggggttgtatcttgccgccgccacgctgtttttgcagaccggaacgtttgcgcttagcgcgatgagcgagttacacggcgacgcacgttatctggtttatggcggcatcctgtttgccgcgtgggggaaatcggcccagctaccgatgcaagcgtggctaccggacgcaatggaagcgccaacaccgatcagcgcctatctccacgccgcatcgatggtgaaagtgggcgtttacatttttgcccgcgctattatcgacggcggcaatatcccgcatgtgattggcggcgttggcatggtcatggcactggtcaccattctttatggctttctgatgtatttgccacagcaggatatgaagcggttgctagcctggtcgaccatcactcaacttggctggatgttcttcggcttgtcgctctccatcttcggctcgcggctggcgctggagggcagcatcgcctacatcgtcaaccacgcgttcgctaaaagcctgtttttccttgtagcaggtgcgctgagttacagctgcggcacgcgcttgttgccgcgtctgcgtggcgtattgcacaccctgccgttgccaggcgtgggtttctgcgtggcagcgctggcgattaccggcgtgccgccgttcaacggcttcttcagtaaattcccgctgtttgctgccggttttgcgttgtcagtggagtactggatcctgctgcccgccatgattcttctgatgattgaatcggtcgccagtttcgcctggtttattcgctggtttggtcgcgttgtgcctggcaaaccgagcgaggccgtcgccgatgccgcaccgctgccaggatcaatgcgcctggtgttgattgtactgattgtgatgtcgctgatttccagcgtaatcgccgcgacctggttgcagtaaggagatgatgaatgaccggttctatgatcgtaaataatctggcgggactgatgatgctgacatcgctgtttgtgattagcgtcaaaagctatcgcctgtcatgcggattttacgcctgccagtcactggtgctggtgtctattttcgccactctctcgtgcctgttcgccgcagagcaactgctgatctggtccgccagcgcctttatcaccaaagtgctgctggtaccgttaatcatgacttacgctgcacgaaatattccccagaacatcccggaaaaagcgttattcggtccggcaatgatggcactgctcgcggcgttaattgtcctgctttgcgcatttgtcgttcagcccgtgaagctaccgatggctaccgggctgaaaccggcgctggcggtagcgttaggtcattttctgcttggcctgctgtgcattgtcagccagcgcaatatcctgcggcaaatttttggttactgcctgatggaaaacggctcccatctggtgctggcgcttcttgcctggcgagcaccggaactggtggaaataggtatcgctaccgacgccatcttcgccgtcattgtgatggtgttactggcaagaaaaatatggcgtacccacggcacgctggacgtgaacaacttgaccgcgctgaagggataatgagatgagttattctgtgatgttcgctttactcctgctcacgccgctgcttttttcgctgctctgttttgcctgccggaaacggagactttctgcgactcgcacggtgaccgtattacatagcttagggatcacactgctgctgattctggcactctgggtggtccaaactgccgctgatgcaggagaaatattcgctgcgggactgtggcttcatattgatggtctgggcggtttgttcctcgccattcttggtgtgattggctttctcaccggtatttactcgattggctacatgcgtcatgaagtggcacacggcgagctttcacccgttacgctgtgcgattactacggtttcttccatctgtttttgttcaccatgctgctggttgttaccagcaataacctgattgtgatgtgggcggcgatcgaagccaccaccttaagctcggcgtttctggtaggcatttacggtcagcgttcatcgctggaagctgcatggaagtacatcattatttgtactgttggtgtcgcttttggtctgttcggtaccgtgctggtatacgccaacgccgccagcgttatgccgcaggcagaaatggcgatattctggagcgaggttcttaagcaatcgtccttgcttgacccaacattaatgctgttggcctttgtgtttttgctaattggctttggtaccaaaaccgggctatttcccatgcacgcctggctgccggatgctcacagtgaagcgccgagtccggtcagcgccctgctctccgccgtattgctgaactgcgcgctgttggtgctgattcgctattacatcattatttgccaagccatcggcagcgatttccccaaccggttgttgctcatcttcggcatgttgtcggttgccgtggcggcatttttcattctggtacagcgggacattaagcgtctgctggcgtactccagcgtggagaacatggggctggtcgcggtggagctaggcattggcgggccgctgggaatttttgccgcgctgctgcacatcttaaaccacagtctggcaaaaacgctgctgttctgcggttccggcaatgtactgctcaagtacggcacgcgcgatctcaacgtcgtctgtgggatgctcaaaatcatgccatttaccgccgtgctgtttggcggcggtgcgctggcgctggcagggatgccgcccttcaacatttttcttagcgaatttatgaccattaccgccggactggcacgtaatcacctgctgattatcgtcctgctgttattgctgttaacgctggtgctggcgggcctggtacggatggctgcgcgggtgttaatggcgaaaccgccgcaggccgttaaccggggtgatctcggctggttgaccacctcgccaatggtgattctgctggtcatgatgctggcgatgggaacgcatattccacaacctgtcatcaggatcctggcgggcgcttccactatagtcctctcagggacgcacgatctgcctgcacaacgtagcacctggcatgattttttgccttcaggcaccgcatctgtttcggagaaacacagtgaacgttaattcatcgtcaaatcgtggcgaagcgattctcgccgccctgaaaacgcagttccccggcgcggtgctggatgaagagcgacaaacgcctgaacaggtcaccattacggtgaaaatcaatctgctgcctgacgttgtacagtatctttattatcaacatgatggctggcttccggtcctgtttggcaacgacgagcggacacttaacggtcattacgcggtttattatgccctttcaatggaaggggccgaaaaatgctggattgtggtgaaggcgctggtcgatgccgacagtcgggagtttccgtcagtcacaccgcgcgtccctgccgcggtctggggcgagcgagaaattcgcgatatgtacgggctgattccggttggcctgccggatcagcgtcgcctggtgttgcccgatgactggccggaagatatgcatccgctgcgcaaagatgcgatggattatcgactgcgccctgaaccgacgactgattccgaaacgtatccgtttatcaatgagggcaacagcgatgcgcgggtgatccctgtcggcccgctgcatatcacctccgatgaaccgggtcacttccgcttgtttgtggatggcgagcaaattgtcgatgctgattaccgcctgttttatgtccatcgcggcatggagaaactggcagaaacgcggatgggctacaacgaagtgaccttcttatcggaccgcgtgtgtgggatttgcggttttgcccacagtgtggcctataccaattcggttgaaaatgcactggggattgaggtgccgcaacgagcacatactattcgctcgattctgctggaagtcgaacggctacacagtcatttgcttaaccttggcctctcctgccatttcgttggttttgataccggctttatgcaatttttccgcgtgcgggaaaagtcgatgacgatggcggaattgctgatcgggtcgcgtaaaacctacggtctgaatctgattggtggtgttcgccgcgatattctcaaagagcaacgtctgcaaacgctgaaactggtgcgcgagatgcgcgccgacgtgtcggagctggtagagatgctgcttgctacgccgaatatggaacaacgcactcagggcattggcattctcgaccgacaaatcgcccgtgatttgcgctttgatcacccctacgccgactacggcaatattccaaaaacactgtttacctttaccggcggcgatgttttctcccgcgtgatggtccgtgtcaaagagacgtttgattcgctggcaatgctggaatttgccctcgacaacatgccggataccccactgctgaccgaaggctttagctataaacctcacgcattcgcgctgggctttgttgaagcgccacgcggtgaagacgtgcactggagcatgctcggtgataaccaaaaattgttccgctggcgctgccgtgccgccacctacgccaactggccggtgttgcgttacatgctgcgcggcaataccgtttctgacgcaccgctgattatcggtagccttgatccctgctactcctgtaccgaccgtgtgacgctggtagatgtgcgcaagcgccagtcaaaaaccgtgccgtataaagagatcgaacgctacggcattgatcgtaaccgttcgccgctgaagtaaggacagaagatgctgaagttactgaaaactattatgcgcgccggaaccgcgacggtgaaatatcccttcgcgccactggaggtcagccctggctttcgcggaaaaccggacctgatgcccagccaatgtattgcctgcggtgcctgcgcctgtgcttgtccggcaaatgcgctgactatccagaccgacgaccagcaaaattcgcgcacctggcagctctatctggggcgttgtatttactgcggacgttgtgaagaagtgtgcccgaccagagccatccagcttaccaataactttgaactgaccgtcaccaataaagccgatctctatacccgcgcgacgttccatctacaacgttgcagccgttgcgaacgcccgtttgccccgcaaaaaaccatcgcactggctgctgaattgttagcacagcaacaaaatgcgccacaaaaccgcgaaatgttgtgggcgcaagcgagcgtctgcccggaatgcaaacaacgcgcgacgctgatcaacgacgatacagatgtactgctggtggctaaggagcagctatgagtccagtgcttacacaacatgtcagccagcccatcacgctggacgagcaaacgcaaaagatgaagcggcatttgctacaggatatccgtcgctcggcttacgtttatcgcgtcgattgcggcggctgcaacgcctgtgaaatcgaaatttttgctgccattacaccagtattcgacgcagaacgttttggcattaaggttgtttcatcaccgcgtcacgccgatattttgttatttactggcgcagtcacccgggcgatgcgtatgcctgcacttcgggcgtatgagtctgcccccgatcataaaatttgtgtttcctacggcgcgtgcggtgtcggcggcggtattttccacgatctctacagcgtctggggcggtagcgacaccattgtccccattgatgtttggatccccggctgcccgccaacaccggccgccaccattcacggtttcgccgtggcgctcggtttgctgcaacagaagattcacgctgtggattatcgcgatcccaccggggtgactatgcaaccgttgtggccgcagatcccgccatcacagcgtatcgccattgagcgagaagcgcggcggctggcgggctatcgtcaggggcgagaaatttgcgatcggctcctgcgccatttaagcgacgatcctacaggaaatcgggttaacacctggttgcgcgatgccgacgatccacgtctcaatagtatcgttcagcaactctttcgcgtactccgggggttacatgactgaagagtgcggggaaattgttttctggacgctgcgaaaaaagtttgtcgccagtagcgacgagatgccggaacacagctctcaggtaatgtattactcgctagctatcggccatcacgttggcgtgattgattgtctgaatgtcgccttccgctgcccactgacggaatacgaagattggcttgcactggtcgaagaggagcaagcccgacgtaagatgctgggggtgatgacttttggtgagattgttattgacgccagccacaccgccctgttgacccgggcattcgcgccactggcggatgacgcgacgtctgtgtggcaggcgcgtagcattcaattcattcatctgttggatgaaattgtgcaggaaccggccatctatctgatggccagaaaaattgcgtgagaaggatttctcattaataaggactgttgatggctatgtcagacgaggcgatgtttgccccgccacaaggaataacaattgaagcggtaaacggaatgctcgcggagcggttagcacagaaacacggcaaggcgtctttattacgcgccttcatcccgctgccgccgccgttcagcccggtacaacttattgaactgcatgttctcaaaagcaacttctattaccgctaccatgatgatggcagcgatgtgacggcaacaacagagtatcagggcgagatggtcgattattcgcgtcacgccgtccttctcggcagtagtggaatggcggagctacgctttattcgcacccacggcagtcgttttacttcccaggattgcacactgtttaactggctggcgcggataatcaccccggttctgcaatcatggctcaatgatgaagaacagcaggtggcgctgcgtttgctggagaaagatcgcgatcatcatcgggtactggttgatattactaatgcagtgctgtcacatcttgatctcgacgatctgatcgctgacgtcgctcgtgagatccatcattttttcggtctggcttcagtcagtatggtactgggcgatcatcgaaagaacgagaagttcagcctgtggtgcagcgatctttctgcctcacattgtgcgtgtctgccacgctgtatgcctggcgaaagtgtattgctgacacaaacgctacaaacccgacaaccgaccttgacgcaccgtgcagatgatctgtttctctggcaacgcgacccgttattactcttacttgcatctaacggctgcgaatctgcgctccttataccgcttacctttggcaaccatacaccgggtgcattgttgctggcgcatacctcttccactctctttagtgaggaaaactgccagctactacaacacatagccgatcgcatcgctattgccgttggcaatgccgatgcctggcgtagcatgaccgatttgcaggaaagtttgcagcaagaaaaccaccagcttagcgagcagctcctttcgaatctgggcatcggtgacattatctatcaaagccaggcaatggaagacctgctccagcaggtagatattgtggcgaagagcgacagtacggtgttgatttgtggtgaaaccggaactggcaaagaggtgatcgccagagcgatccatcaacttagcccgcgacgcgacaagccgctggtcaaaatcaactgcgctgccatccccgccagtcttctggaaagtgagttattcggtcatgacaaaggggcgtttactggtgcgattaatacccatcgtggtcgttttgaaattgccgatggcggcacgttgtttctcgatgaaattggcgatctgccgttagaacttcagcctaaactgctgcgcgtattgcaggagcgggagattgagcgtctcggcgggagtagaacgatcccggtgaatgtcagagtcattgccgccaccaaccgtgatttgtggcaaatggttgaagatcgccagtttcgcagcgatctcttttatcgcctgaatgtcttcccactggaattgccgccgctacgcgaccgtccggaagatatccctcttttagcaaaacatttcacgcaaaaaatggcgcgccatatgaatcgcgcaattgacgccatcccgaccgaggcactacgccagttgatgtcgtgggattggccgggcaacgtgcgcgagctggaaaacgtgattgagcgggcggtactgttgactcgtggtaacagtctgaatttacatctaaatgtccgacaaagccgtttactgccgacgctaaatgaagattcagcgcttcgcagttcaatggcgcagttactgcacccgacgacgccagagaatgacgaagaagaacgtcagcgcattgttcaggtattgcgagaaaccaatggcattgttgccgggccccgtggcgcagcgacgcgattagggatgaagcgcaccacgctgctgtcacgaatgcagcggctggggatctcggttcgcgaggtgttgtaatctgcttttgcaggagtatgcatgagaaacaaactctctttcgacttgcagttgagcgccagaaaagcggcaatcgctgaacggattgccgcccataaaattgcccgcagtaaagtgtcggtctttttaatggcgatgtccgctggcgtgtttatggcgatcggatttactttttacctttccgttatcgccgatgccccgtcttcacaggcattaacccatctggtgggcggcctttgctttacactcggctttattttgctggcggtttgcggcaccagcctgttcacctcgtcggtaatgacggtgatggcaaaaagtcggggcgttattagttggcgaacttggctgattaacgcacttctggtggcctgcggtaatctggcaggtattgcctgtttcagtttgttaatctggttttccgggctggtgatgagtgaaaacgcgatgtggggagtcgcggttttacactgcgccgagggcaaaatgcatcatacatttactgaatctgtcagcctcggcattatgtgcaatctgatggtttgcctggcgctgtggatgagttattgcgggcgttcgttatgcgacaaaatcgtcgccatgattttgcccatcaccctgtttgtcgccagtggctttgagcactgtatcgccaatttgtttgtgattccgttcgccattgccattcgccatttcgcccctccccccttctggcagctggcgcacagtagcgcagacaattttccggcactgacggtcagccattttattaccgccaatctgctcccggtgatgctgggtaatattatcggcggtgcggtgctggtgagtatgtgttatcgggctatttatttacgtcaggaaccctgaaaaatcagcccggcgaaacagttcgtcgggctgaagattattcttgcgcgatttgcccatcgggccaggcatgaatcacggctttgatcagcgtcgccaacggaatggcgaagaatacgccccagaatccccacaaaccaccgaagatcaccaccgataaaataatcaccagcggatgcaggttaaccgcttcggagaacaacaccggcactaacaggttgccgtccagcgcctgaataatcagatacaccgcgaagcagctccagaattcagtacctgcgccaaactggaatagcgccacgccaaccaccggaatggtcaccacaaatgcgccaatgtacggaataagaaccgagaagccgaccagcactgccagcagcagcgaatagttcagcccgaagagcaagaaccccagccaggtggcgatccccaccacgatcatctccagcactttgccgcggatatagttggtgatttgttgattcatctccttccacacctgtcctgccagcccacggttacgcggcagcacccggcgaacggcgttcagcatctgctctttgtctttcagcaggaagaagaccatcaatggcaccagcaccagatagacggctatggtcagcaaaccgaccagcgaggcgagggaaattttcaccaccgaatcgcccatggtcagcatccgactgcgcatattttcggccattgcatcaataatgcccgcgtccattaacgccggatagcggcgcggcaacgtggcggcaaagtcagaaagcttattgagcatccccggcatatcgcggattaagtagatgccctgttgccaggcgataggcagtaccacgaacgccatcagtagcaatataccgacgaaaaccaccaatacaatcgacgtcgcccagcggcgggagcagccaatagattgcagacgcacggttggccattccagcaaataggccagcacaatagccaccagcaacggagcaagcaggccactaaagaaaaagataatgccaaatccggcaactaaaataaccagcaaggcaatcgcttccgggtcgctaaaacggcggcgataccattgcatcaacatttcgagcataaagaccttccctgaacctcaagagcgggattgcgatccgcaattgtatcgaaatgtcacaaaaaagacttcgctttttatgacggattcaggaaactgaaaagtcatttgagtgggctaatcttcgccgttacactcaaaggcggcgcggtgggaacgatatttcacagtatcggtcaaatgactatctccagaaatacaggatagaggttatgttcaggcagttgaaaaaaaacctggttgcaaccctcattgctgctatgaccattggtcaggtagccccggcgtttgccgacagcgcagacaccttgccggatatgggaacctccgcaggaagcacgctttccattggtcaggaaatgcagatgggcgactattatgtccgccagctacgcggcagcgcgccgttaattaatgacccgctgttaacgcaatatattaattcgctggggatgcgtctggtttcgcatgccaattcggttaagacaccgtttcatttttttctgatcaacaacgacgaaattaacgcctttgctttctttggcggcaacgtggtgctgcactctgccctgttccgttattccgataacgaaagtcaactggcttcagttatggcgcacgaaatctcccacgtcacccaacgtcacctggcgcgagcgatggaagatcagcagcgcagcgcgccgctgacctgggtcggcgcgttaggttctattttactggcgatggccagtccgcaggcggggatggcggcgctgaccggtacactggcgggaacgcgtcaggggatgatcagtttcacccagcaaaatgaacaggaagcggaccgcattggtattcaggtgctgcaacgctcgggattcgatccgcaggcgatgccaaccttcctcgaaaaattactcgatcaggcgcgttactcctcgcgcccgccggaaattttattgactcacccgttgccggaaagtcgtctggcagatgcccgcaaccgtgctaatcagatgcgcccgatggtggtgcagtcgtcggaagatttctatctggcgaaagcgcgcacactggggatgtataattccggacgtaaccagctcaccagtgatttgctggatgaatgggcgaaaggaaacgttcgtcagcaacgagcagcacaatatggtcgtgctttacaggcgatggaagccaataaatacgacgaggcgcgtaaaacgctgcaaccgttactggcggcagaacctggcaacgcatggtatctcgatctggctactgatatcgatcttgggcaaaacaaagccaatgaggcgatcaatcgtctgaaaaatgcccgcgatttacgcaccaatccggtgttgcagctcaacctggcgaacgcttatttgcaaggcggtcaaccacaagaagcggccaatattctgaatcgctacacctttaataataaagatgacagcaacggctgggatttgctggcacaggcggaagccgcgctaaataaccgcgatcaggagctggctgcgcgagcagaaggttatgcgctcgccggacgactcgatcaggccatttcgctgttgagtagcgccagttcgcaggtgaaattaggcagcctgcaacaagcgcgttacgatgcgcgcatcgaccagttgcgccagctgcaggaacgctttaagccttataccaagatgtaattcgcattaaaggaagaacaatgaccaaacaggtaaaaatctaccataacccacgctgttcaaagagccgggaaacgctgaacctgctgaaagaaaacggcgtggagccagaagtggtgctctaccttgagacacccgccgatgcggcaacgctgcgcgatttgctgaaaatactggggatgaatagcgcccgtgaattgatgcgccagaaagaggatctttataaagaactgaacctggctgacagttcgcttagcgaagaggcgctgattcaggcaatggtggataatccgaagctgatggagcgcccgattgtggtcgcgaatggcaaagcgcggattggtcgtccaccggagcaggtactggaaatcgtgggttaagatgtgctccatcgctagttgaagcacattgccggatgcgacgcttgccacgtcttatccggcctacgaatactatggattaacttcgcgtagttcggataaggcgttcgcgccgcatccgacaataaacaccttatctacaacttcagaatttctttcacaaacggaatggtcagcttacgttgcgcggtaatcgacgcacgatccaactgatccaacgtcataaatagcgtgcgcatttctctgtcgagccgcttcagcaagaaacgccccacatcttccggcagttcaaaaccacgcaaacgcgcgcgtaactgtagcgcctgcaacttatcttcatcagaaagtggctgcaatttgtagatctgcccccagtcgagtcgcgacgcgagatccggtaatcccagattcaactgccgcggtggacgatcgccggtgatcaacaaccgtgttttgcccgattccagaattcgattgtagagatcgaaaatcgccatctcccacaactcatcgcctgcaatacactcaatgttgtcgatacagaccagcgacaaatgctccataccgtcgagcacttccggaacaaaccaggtgcgtttatccagcgggacatagcccaccgcatcgccacgctgcgacaattccgcgcaagccgcgtgcagcagatggctgcgccccgcgccttcgcgtgcccagagatagatgtaaccgctatgttcctgacgcagcacgttttgcagcgcggccagtaaagaggagttatcccccggccagaaacttgcaaaggtttcgtcgtcaggaagataaagtggcaaagagagctgtgccggtgtgttcagagatacctcaaccaggatttcacaaaatcgcgagaagtttaccacagaatcccatgatgtttgaaccgggcagcaacactgcccggtcggtacattatttgtctgttatatccgcgtcttctgcgtccagcaccacttcttcagggcgcagcacactgatcagtttgaagatcaaacttaagccgataccgacgatggtcgccagcgccataccttttaactccgccgcgccgatgtttaccttcgcgccactgacgccgatgatcaaaatcacggaagtcaggatcaggttctgtgctttgttgtaatccactttcgattcgatcaaaacacgaataccggaagcaccgatgacaccataaagcagcagcgaaacgccgcccatcaccggcaatgggatcatctggatagcggcagccagtttaccgacgcaggaaagcaggatagcgaaaatcgccgccccgccgataacccaggtactgtaaacacgggtgatcgccatcacgccaatgttttctccgtaagtagtatttggcgtagagccaaagaagccggaaatcacggtcgacaagccattagcaaacatcgaacggtgcagacctggatcgcgcagcagatcttttttgacgatattagccgttactaccaggtgccctacgtgttcggcaataaccactaacgccgctggcagaatagtcagaatggcaaaccactcgaagcgcggcgtatagagggttggcagcgcaaaccagtgagcattaataatcggcgtggtatcgacaattcccattgcgaaagagagcgcgtaccccaccagcacgccaattaaaatcgggataattgccaggaaaccacgaaacagcacggaacctaaaaccgtgaccgccagggtggtaatagagatgatgatggttttggagtctggcgtttgcccttcagccgggagtaaacccgccataccggcagctacgcccgccagctccagaccgatgacggcaacgattgcgcccattgccgcaggtggaaacagcacgtccagccagccggtccccgctttcttcacgataaaagaaaccaggcagaacagcacgccgcacataataaagccgcccagcgcgacttcataccctaacggcaacagtaacaataccggtgaaataaaggcaaagctggaaccaagataagccggaattttccctttacagatgaagagatacagcagcgttccaataccgttaaataacagtacagtcgccgggttaatatgaaataagacgggcaccaggacggttgcaccaaacatggcgaacaaatgttgcaaactaagcgggattgtctgtaaaagtggcggtctttcactcaccccgatagcacggcgcgtcatagtattatcctctgtattatgtgttataggcgctttactcaaaaaaaagccgactcttaaagtcggctttaattatttttattctttatttcgtaccaaagattttgtcaccggcatcgccgaggcccggaataatgtatccgtgctcgttcagtccctgatcaatcgatgcggtatacagttcgacgtccgggtgcgctttttccagcgcagcgataccttctggcgcagctaccagcaccagaactttgatgctgctgcagcccgcttttttcagcaggtcgatggtcgcgataacggaaccaccggttgccagcattgggtcaacgatcagcgccatacgctcatcgatgttagaaaccagtttctggaagtacggtaccggctccagcgtttcttcattacggtacataccgacaacgctgatgcgcgcgctcggaacgttttccagcacaccgtccatcataccaagacccgcacgcagaattggcacaacggtaattttcttacctttgatctggtcgatttctaccgggccgttccagccttcgatagttactttttccgtttcgaggtcggcggtcgcttcgtaagtcagcaggctacccacttcggaagcgagttcgcgaaagcgcttggtgctgatatcttgctcacgcatcagtcccagcttgtgtttgacgagtgggtgtttgacttccacgatcttcatactctttctcctttgaggggcagccacaaaaaaaatcgacggattatacctcctttcttcaaggcggcaatattcttttcgttgactttagtcaaaatgataacggtttgagataaagttattttatattcagatggttatgaaagaagattattccatccgaaaactaacctttaccctggcacaagtcttctttcgccgcgcgcctggggaaaagacgtgcaaaaaggttgtgtaaagcagtctcgcaaacgtttgctttccctgttagaattgcgccgaattttatttttctaccgcaagtaacgcgtggggacccaagcagtgaccgataaaacctctcttagctacaaagatgccggtgttgatattgacgcgggtaatgctctggttggaagaatcaaaggcgtagtgaagaaaacgcgtcgtccggaagtgatgggcggtctgggcggcttcggtgcgctgtgtgcattgccgcaaaaatatcgtgaacccgtgctggtttctggcactgacggcgtaggtaccaagctgcgtctggcaatggacttaaaacgtcacgacaccattggtattgatctggtcgccatgtgcgttaatgacctggtggtgcaaggtgcagagccgctgtttttcctcgactattacgcaaccggaaaactggatgttgataccgcttcagcggtgatcagcggcattgcggaaggttgtctgcaatcaggctgttcactggtgggtggcgaaacggcagaaatgccggggatgtatcacggtgaggattacgatgtcgcgggtttctgcgttggcgtggtagaaaaatcagaaatcatcgacggctctaaagtcagcgacggcgatgtgctgattgcactcggttccagcggtccacactcgaacggctattcgctggtgcgcaaaattcttgaagtcagcggttgtgatccgcaaaccaccgaacttgatggtaagccattagccgatcatctgctggcaccgacccgcatttacgtgaagtcagtgctggagttgattgaaaaggtcgatgtgcatgccattgcgcacctgaccggcggcggcttctgggaaaacattccgcgcgtattgccagataatactcaggcagtgattgatgaatcttcctggcagtggccggaagtgttcaactggctgcaaacggcaggtaacgttgagcaccatgaaatgtatcgcaccttcaactgcggcgtcgggatgattattgccctgcctgctccggaagtggacaaagccctcgccctgctcaatgccaacggtgaaaacgcgtggaaaatcggtatcatcaaagcctctgattccgaacaacgcgtggttatcgaataatgaatattgtggtgcttatttccggcaacggaagtaatttacaggcaattattgacgcctgtaaaaccaacaaaattaaaggcaccgtacgggcagttttcagcaataaggccgacgcgttcggccttgaacgcgcccgccaggcgggtattgcaacgcatacgctcatcgccagcgcgtttgacagtcgtgaagcctatgaccgggagttgattcatgaaatcgacatgtacgcacccgatgtggtcgtgctggctggttttatgcgcattctcagcccggcgtttgtctcccactatgccgggcgtttgctgaacattcacccttctctgctgccgaaatatcccggattacacacccatcgtcaggcgctggaaaatggcgatgaagagcacggtacatcggtgcatttcgtcaccgatgaactggacggtggcccggttattttacaggcgaaagtcccggtatttgctggtgattcggaagatgacatcaccgcccgcgtgcaaacccaggaacacgccatttatccactggtgattagctggtttgccgatggtcgtctgaaaatgcacgaaaacgccgcgtggctggatggtcaacgtctgccgccgcagggctacgctgccgacgagtaatacccccgtaattaaagcgccagctctgccgctggcgtttttcaattcacctgtaaatcgcaagctccagcagtttttttcccccttttctggcatagttggacatctgccaatattgctcgccataatatccaggcagtgtcccgtgaataaaacggagtaaaagtggtaatgggtcaggaaaagctatacatcgaaaaagagctcagttggttatcgttcaatgaacgcgtgcttcaggaagcggcggacaaatctaacccgctgattgaaaggatgcgtttcctggggatctattccaataaccttgatgagttctataaagtccgcttcgctgaactgaagcgacgcatcattattagcgaagaacaaggctccaactctcattcccgccatttactgggcaaaattcagtcccgggtgctgaaagccgatcaggaattcgacggcctctacaacgagctattgctggagatggcgcgcaaccagatcttcctgattaatgaacgccagctctccgtcaatcaacaaaactggctgcgtcattattttaagcagtatctgcgtcagcacattacgccgattttaatcaatcctgacactgacttagtgcagttcctgaaagatgattacacctatctggcggtggaaattatccgtggcgataccatccgttacgcgctgctggagatcccatcagataaagtgccgcgctttgtgaatttaccgccagaagcgccgcgtcgacgcaagccgatgattcttctggataacattctgcgttactgccttgatgatattttcaaaggcttctttgattatgacgcgctgaatgcctattcaatgaagatgacccgcgatgccgaatacgatttagtgcatgagatggaagccagcctgatggagttgatgtcttccagtctcaagcagcgtttaactgctgagccggtgcgttttgtttatcagcgcgatatgcccaatgcgctggttgaagtgttacgcgaaaaactgactatttcccgctacgactccatcgtccccggcggtcgttatcataattttaaagactttattaatttccccaatgtcggcaaagccaatctggtgaacaaaccactgccgcgtttacgccatatttggtttgataaagcccagttccgcaatggttttgatgccattcgcgaacgcgatgtgttgctctattatccttatcacacctttgagcatgtgctggaactgctgcgtcaggcttcgttcgacccgagcgtactggcgattaaaattaacatttaccgcgtggcgaaagattcacgcatcatcgactcgatgatccacgccgcacataacggtaagaaagtcaccgtggtggttgagttacaggcgcgtttcgacgaagaagccaacattcactgggcgaagcgcctgaccgaagcaggcgtgcacgttatcttctctgcgccggggctgaaaattcacgccaaactgttcctgatttcacgtaaagaaaacggtgaagtggtgcgttatgcacacatcgggaccgggaactttaacgaaaaaaccgcgcgtctttatactgactattcgttgctgaccgccgatgcgcgcatcaccaacgaagtacggcgggtatttaactttattgaaaacccataccgtccggtgacatttgattatttaatggtatcgccgcaaaactcccgccgcctattgtatgaaatggtggaccgcgagatcgccaacgcgcagcaagggctgcccagtggtatcaccctgaagctaaataaccttgtcgataaaggcctggttgatcgtctgtatgcggcctccagctccggcgtaccggttaatctgctggttcgcggaatgtgttcgctgatccccaatctggaaggcattagcgacaacattcgtgccatcagtattgttgaccgttaccttgaacatgaccgggtttatatttttgaaaatggcggcgataaaaaggtctacctttcttccgccgactggatgacgcgcaatattgattatcgtattgaagtggcgacgccgctgctcgatccgcgcctgaagcagcgggtactggacatcatcgacatattgttcagcgatacggtcaaagcacgttatatcgataaagaactcagtaatcgctacgttccccgcggcaatcgccgcaaagtacgggcgcagttggcgatttatgactacatcaaatcactcgaacaacctgaataaccctatgccaatacacgataaatcccctcgtccgcaggagtttgctgcggtcgatcttggttcaaacagttttcacatggtcatagcccgtgtggtagatggtgccatgcagattattggccgcctgaaacagcgggtgcatctggcggacggcctggggccagataatatgttgagtgaagaggcaatgacgcgcggtttaaactgtctgtcgctgtttgccgaacggctacaagggttttctcctgccagcgtctgtatagttggtacccatacgctgcgtcaggcgctgaacgccactgactttctgaaacgcgcggaaaaggtcattccctacccgattgaaattatttccggtaatgaagaagcccgtctgatttttatgggcgtggaacatacccaaccggaaaaaggtcgcaaactggttattgatattggcggcggatctacggaactggtgattggtgaaaatttcgaacctattctcgttgaaagccgccggatgggttgtgtcagctttgcccagctttattttcctggcggggtcatcaataaagagaattttcagcgcgctcgcatggcggcagcacaaaaactggaaactttaacctggcaattccgtattcagggctggaacgttgcaatgggcgcttccggtaccataaaagccgcccatgaagtgttaatggaaatgggcgagaaagacgggataattaccccggaacgtctggaaaaactggtaaaagaagttttacgtcaccgtaatttcgcatcgctgagtttaccgggtctttccgaagagcggaaaacagtcttcgttccgggactggcgattttatgcggtgtgtttgatgctttagccatccgtgaactgcgcctttctgacggggcgttacgcgaaggcgtactgtatgaaatggaaggacgtttccgtcatcaggatgtgcgtagtcgcaccgccagcagcctcgccaaccagtatcacatcgacagcgaacaggcccgacgggtgctggataccactatgcaaatgtacgaacagtggcgggaacagcaaccgaagctggcgcatccgcaactggaggcgctactgcgatgggccgccatgctgcatgaggtcgggttgaatatcaaccacagcggtttgcatcgccactccgcttatattctgcaaaacagtgacttgccgggttttaatcaggaacagcagctgatgatggcgacactggtgcgctatcaccgtaaagcgattaagctcgacgatctaccgcgctttaccttgtttaagaagaaacagttcctgccactgatacagctattgcgccttggcgtattactcaacaatcaacgtcaggcaaccaccacaccgccaacattgacgctgattactgatgacagtcactggacactgcgtttcccgcatgactggtttagtcagaatgcgctggtactgcttgatctggaaaaggagcaagaatactgggaaggcgtggctggctggcggttgaaaattgaagaagaaagtacaccagaaatcgccgcttaatactttgcgggccgacgagaaatgtcggcccgcattattcaggcactttcgcgaatgggttcgatttcattcagcgtatcaattaacggctgcggcttaccaataagataaccctgcatataatcgatccccaaagagagcaccgcctcgcggatctcttcgttttcaacgtactctgccactaccagcattttcttcattcgcgccaggtggcaaatcgatgccactatctgataatccagactatttgacacaatattgcggataaaactgccgtcaattttaagcagatcggcattcacatttttaagccgcgcatagctggcgtagccggtgccgaaatcatcaatcgcaatctggcagcctaattcctgaagatgctgcaaggtgatttgcgcctgcttaacattggtcagagcattactttcggtgacttcaaaaataagttgccacgcttcaatctgatatttagccagcaactgactgacttcaacaggaaaacgagcctgacataccgaggttggagacagattaatagcaaaacggtgagcgggcatcttcgctctgttttcagccataaattgcagcgtatgctcaatgacccacatgtcgatactcgacgataaaccaaattcgtgcgcgaccggcaagaagctatcggggctgatcagttcatcattctcacctttcatgcgcagaagaatttcatggtaaacatcaccacgcataccggtaatcggctgggccatcaggaaaaaatggttgtgttccagcgcctgctgtagtcgattcatcatcgcgactttatctttcaattcgcgttgcaaatacattgccccgcgacgctgcatattttccggggcgttggtcacgatggaaagttcggcgaccgtatttagctctcccagcagcaggtagatatgattcactggcgagcgcacatagcagtaactgacgccaatctgcggttgcatcggcatgccatcccaaaagaaacgaaattgcttgagatggctatccagtgcggtaatgcgctcctggtgcgattctgtattcagtcgcagcgcgagatcgttacccgaaagctgataaacatcttcacccggttccagcaagggtgacagccagtgagaaagtttttgcttgtattgaatccgcagcatgatgccatagttcttaaccagcatttccatgccagggatgcgtaaataacaaagcgcagaccagggggcatcacgcaacgcgcgattcagggcgcgaacatttggcagatgaaccaccgggtccacatacgcaagccgctgaatgcgtctgactaccgctctctgacgggttgccagtacagccatataattgacaataaaagagaataccagataactggaggaggttatggtcagctgcgtggtatagccaggataaatgggaatgtaattttgatagctgtggatgctgatcatcaacacgaccgcccagagcagcgaaatcagcttataaccatagcgcatcgctccccacatcatcaggggcagcaataatgacaaggtataattggtgctaaaaattgtgcttttttcatttaacggcatgcataacagcaacaataaagcacctaatgccagtagccagagcgcgaactcttttttggtgactttggcatcaacctgctgttttaattgcgaataatagctacgtaaataaaatggatttcgcactacccgaatgatgaagtagcacagcgggacaccgatcagattacccaccagtaaggcctgataattgattaaagtcccgaggttaaaaggcatgacaccgaccagattttctctgctcgccagtaatcctacaaatgcagcaaactggaaaagtatcagaaacagcgttgcaggaaacacaatctgccagaatatacgctgggaaattaaacgggtatcaccatgtgaaacgttgttacgccggggagtaaagaccctgtaaccgccccaacagagaatgataatgataataaaattagccgttaatgatagcgtttcgtaaaaacccagctctgcatatttgcggacaaaaatccctaaggcgatccctggcaatgccgcccagctgaaaaacatcatcatgctgatcatcagtgccagaggcagataaaagagaaaaacctcaccggaagaaatatgcgcgaaagtattaatgtgggcgaaaatgggcaagattaaagaaggcaggaacagcggaagcccccaccatttatcacgtatttttatataagttgcattcagtttcatagatgctcagcagaatcccccacatcctgaaggaggtgtattcagacaggcatcccacctgacttcgaatgatgattattcatcactatagagagcattgattctaagtgtcatatgaaagtaccaattgatatatatcaaacaaaataaccctgattaatgaattattacgtttatcatgttaattcatcattattacatcatcattgtaaataattaaattaacttccataacattaaaatatgtatccactgacgcttttttacataacgaagaattgaccattttgtcctgttgtgccttaatgtaagtaccgtccacagcgtgggacatacttcaaggaaccttttgtgagtcaggcaaccagtatgcgaaaacgacaccgatttaacagtcgcatgacccgtatcgtactgctcatcagctttatcttcttctttggccgttttatctactcgtccgtcggtgcctggcagcaccatcagagcaaaaaagaagctcagcaatccacactctccgtcgaatcaccggtacaacgttagcggttaccttctccactttcacagaacataacggcacttcgctgtcggatgcttttgctgtttgggattatcaaagcggcagatattctttcatcttaaattttacgtctttatcctgactgatgtttatcctgtttggctgcgaaataaatataaaattaatatatatgttgtaatgatatatttttataaattattccctgcgtgaattttaataaatttaatctatccctttatacgcaatacatttactttcctcttttgatgatcttaaatgtcttatttttcgtaatgtgtataacaaggaatagtgatgaaatttaaaaaatgtcttctgcctgtggcaatgttagcgtcattcactctggcaggatgccagtcaaatgctgacgatcatgctgccgatgtttatcaaaccgatcaactgaataccaaacaagaaactaaaaccgttaatattatttccattcttcccgcaaaagttgccgtagacaactcccaaaataaacggaacgcacaagccttcggcgcgcttattggcgcagtcgctggcggtgttatcggccacaacgtcgggtctggcagcaattccggaacgacggcaggtgcagttggcggcggagctgtaggcgcggcagcgggttctatggtgaatgataaaaccttagtggaaggtgtttctttaacctataaggaaggcaccaaagtgtatacctctacccaggtgggtaaagagtgccagtttacgacaggtttagccgttgttattaccacgacgtataacgaaacgcgtattcagccaaataccaaatgtcctgaaaagagctaataatcaggaggagtcatgaagaaagtttttctttgcgccatcttagcctccttaagctatccggctatcgcctcatcattgcaggatcaactctctgctgtcgcagaagcggaacagcaaggtaaaaatgaagagcaaaggcagcatgacgaatgggtcgcggagcgcaacagggaaatccagcaagagaagcaacgtcgcgcaaatgcccaggccgccgctaacaaaagagcggcaacggcagcggcaaataagaaagctcgtcaggataaactggacgccgaagcctctgcggacaaaaaacgcgatcaaagttatgaagatgagctacgcagcttagagattcagaaacaaaaactggcgctggcgaaagaagaagcccgcgttaagcgagaaaacgaatttatcgatcaggaactgaagcacaaagctgcgcaaaccgatgtggtgcaatctgaagctgacgccaacagaaatatgactgaaggcggtcgcgatctgatgaaaagcgtgggcaaagcagaagagaacaaatcggacagctggtttaattaatcgatgttagtaacttcaatcctataattcttgaagataaaaaaccctctgtagtaacagagggttttgttcattcatagtgcagggtcaaatcattcccactcaatggtagctggcggcttgccgctgatgtcatacaccacgcgggaaataccgttcacttcattgataatgcggttggaaacgcgaccgaggaaatcgtacggcagatgcgcccagtgtgcggtcataaagtcgatggtttcgacagcacgcagagagacaacccagtcatacttacgaccatcgcccattacgccaacggaacgtaccggcaggaacacagtgaacgcctggctgactttgtcgtacaggtccgctttacgcagttcttcaatgaagatggcgtcagcacggcgcagcaggtcacagtactctttcttcacttcacccagaacacgaacgccaaggcctggtcccgggaacgggtgacggtacagcatgtcgtacggcaggcccagctccagaccaatcttacgcacttcgtctttgaacagctctttcagcggttcaaccaggcccatcttcatctctttcggcaggccgcccacgttgtggtgagatttgatgacgtgtgctttaccggttgcagacgccgcagattcgataacgtcagggtagatggtgccctgcgccagccacttcacgtcttccagtttcagcgcttcttcatcgaatacttcaacgaaaacgcgaccgatgattttacgttttgcttccggatcgttttcgccagccagcgctgacaggaagcgatcttctgccggtacgtgaacaatgttaagaccaaagtgatcgccaaacatatccagaacctgctctgcttcgttgaggcgcagcaggccgttgtcgacgaatacgcaagtcaggtttttaccgatagcgcggtgcagcagcattgcggttacggaggaatccacaccaccagagaggccgaggatgactttatcgtcgcctacctgctcgcggatgcgagctacagcatcgtcgataattttcgctggcgtccacagggcttcacactggcagatatcacgcacaaaacgctccagcatgcgcataccctggcgggtatgagtcacttccgggtggaactgtacgccatagaagcgtttttcttcgttagccataatggcaaacgggcagctttcggtgctggctacggtgatgaagtcggacggaatagcggtaactttatcgccgtggctcatccagacatcgagcagcggtttaccgtctgcggtcagcgcatcttcgataccgcgaaccagtgcgctgtcgtttacgacttcaacctgcgcgtagccaaattcacgttcgttagaggcttcaacgtgaccgcccaactgcattgccatggtctgcatgccatagcaaacgccgaataccggtacgcctgcttcaaagacatactgcggcgcacgcggactgttttcttcagtagtactttccgggccgccggaaagaataatgccgcttggattgaagtcacgaatttgtgcttctgtcacatcccacgcccacagttcgcagtaaacacccagctcacgcacgcggcgcgcaaccagttgagtgtactgagaaccgaagtccagaatgaggatgcgatgcttatgaatgttttccgtcattgacgcttattccgaggcaagtgaaacagataatataaatcgcccgacatgaagtcgggcgaagagaatcaggagcccagacggtagttcggggactctttagtaatggtcacgtcgtgaacgtggctttcctgaatgcccgcaccgctgatacgtacaaactccgctttagtacgcagttcgtcgatagtaccacagccggtcagacccatacaggagcgcaggccgcccatctgctggtgaatgatctctttcaggcgacctttataggctacgcgaccttcgataccttccggcaccagtttgtcggcagcgttatcgctctggaaataacggtcagaggaacctttggacatcgcgcccagggaacccataccacggtaagatttgtaagaacggccctggtagagttcgatttcacccggagattcttcagtacccgccagcatggaacctaccatcaccgcgcttgcgccagcggcgatagctttggcgatgtcgccggagaagcgaataccgccatcagcgataaccggaataccggtgccttccagggcttctactgcgtcagcaacagcggtaatctgcggaacaccgacgccagtcacgatacgagttgtacagatagagccagggccaatgccgactttaaccgcactgcaaccagcttctgccagagcgcgtgcacctgcagctgttgccacgttgccgccgataatttgcagatccggatatttagcacgggtttcacggatacgttgcagtacaccttctgagtgaccgtgggaggagtcgatcagcagaacgtcaacgcctgcggcaaccagcgcgtcaacacgctcttcgttacccgcacctgcgccaaccgctgcaccaacacgcagacggccttgctcgtctttacaggcgttcggtttacgttccgctttctggaagtctttcacggtgatcatgccgatcaggtggaattcgtcatcaaccaccagcgctttttcaacgcgtttttcgtgcatttttgccagcaccacttcacgggcttcaccttcacgcacggtgaccagacgctctttcggcgtcatgtaaacgctaaccggctggttcaggtcggtaacaaaacgcacgtcacgaccggtgataatacccaccagttcgttttcttcggtaacgaccggatagcccgcaaaaccgttacgctcggtcagttctttcacttcgcgcagcgtcgtggttggcagaacagtctgcggatcagtcaccacaccagattcgtgttttttcacacggcgaacttcttctgcctggcgttcaatggacatgtttttgtggataaagccgataccgccttcctgagccagagcaatagccaggcgcgcttccgttacggtatccattgctgcggaaagcatagggatattcagacgaatagttttcgtcagctgggtgctgaggtcagcagtattcggcagaacggtagagtgagcaggaacgaggagaacgtcgtcaaacgtcagagcttctttagcgatacgtagcatgggcaatatctcgaccagagtggttaataaatattgccgcggcattatacagagcgtaaccgattgcatctacccctttttgcaaaaaatgcttgctatccccgaagggcgggttactatcgactgaataacctgctgatttagaatttgatctcgctcacatgttaccttctcaatcccctgcaatttttaccgttagtcgcctgaatcaaacggttcgtctgctgcttgagcatgagatgggacaggtttggatcagcggcgaaatttctaatttcacgcaaccagcttccggtcactggtactttacactcaaagacgacaccgcccaggtacgctgcgcgatgttccgcaacagcaaccgccgggtgaccttccgcccacagcatgggcaacaagttttagttcgcgccaatattacgctctacgagccgcgcggcgactaccagataatcgttgagagtatgcagccggccggtgaagggctgctgcaacagaagtacgaacagctcaaagcgaagttgcaggctgaaggtttgttcgatcagcaatacaaaaaaccacttccctcccctgcgcattgcgttggtgtgatcacctcaaaaaccggtgctgcgctacatgatattttgcatgtgttaaaacgtcgcgatccttctctgccggtgatcatctaccctgccgccgttcagggcgatgacgcgccggggcaaattgttcgcgccattgaactggcgaatcagcgcaatgagtgcgacgtattgatcgtcgggcgcggcggcggttcgctggaagatttatggagttttaacgacgaacgcgtagcgcgggcgatttttaccagccgcattccggttgtcagcgccgtcgggcatgagacggatgtgaccattgccgattttgttgccgatctgcgtgcgccaacgccgtctgccgccgctgaagtagtgagccgtaatcagcaagagttactgcgccaggtgcaatcgacccgtcaacggctggagatggcgatggattattatctcgccaaccgcacacgtcgctttacgcaaattcatcaccgattacagcaacagcatccgcagctccggctggcacgccagcaaaccatgcttgagcgcctgcaaaagcgaatgagctttgcgctggaaaatcaacttaagcgtaccgggcaacagcagcagcggttaacacagcggctgaatcagcaaaatccacagccgaagattcatcgcgcgcaaacgcgcattcagcaactggaatatcgtttagcagaaaccctgcgcgcacagcttagcgccacgcgtgaacgtttcggtaatgcagtaacgcacctcgaagccgtaagcccactgtcaacgctggcgcgtggatacagcgttactactgctactgacggcaatgtactgaaaaaagtgaagcaagttaaagcgggtgaaatgctaaccacacgtctggaagacggctggatagaaagtgaagtaaaaaacatccagccagtaaaaaaatcgcgtaaaaaggtgcattaagccagcacgaattcaacgcgttttttcgatatcaagccatgcccgtgctgacagaagtaatctactgcaccacaggcttttaacacctgcaacggttgatggcagtctggacaaagagctttcatttcaataaattccccgcaggatcggcaacgcgcatggccgttatcctgatcaagcacatgctgacattgtggacaatgcagttccatatgaattcctccggtagccattccctctacattcatagagggaatggcagataaaatacttacggataattatttatttttcttgatgtgcttcatcagacgcttacgtttacgcatctgggttggcgtcagggtgttacgcttattcgcatacgggttttccccttctttgaactgaatacgaatcggcgatcccattacgtccagcgatttgcggaagtagttcatcaagtagcgcttgtaggaatcaggcaggtctttcacctgattaccgtgaatcaccacaatcggcgggttataaccaccggcgtgggcatatttcagcttcacacgacgaccgcgtaccagcggcggttggtgatcttcaacagccatcgtcatgatgcgcgtcagcatagaggtccccacacgacgggtggagctgtcatacgcttcacgtactgattcaaacaagttaccaacaccactgccgtgcaaggcagagataaagtgcacacgagcaaaatcgataaagcccagacggaagtccagcgtttctttcacctgctctttcacttcctgactcaggccatcccacttattcaccacaatgacaagtgagcgcccactattgagaataaagcccagcagcgagagatcctgatcggaaataccttcgcgcgcatcaatcactaacatcaccacgttggcgtcttcaatggcctgcaacgttttgattacggagaatttctctacagcatcggtgattttgccgcgtttacgtacgccagcggtgtcaatgagcacatactcacgtccatcgcgttccattgggatgtagatgctgtcacgcgtcgtgccaggcatgtcgtaaacaacaacgcgctcttcaccaagaatacggttagtgagtgtagacttacctacgttcggacgacccacaatcgccagtttgatcggcagactttgcgggtcgaagtcgtcttcctcttcttcttcgccgttctcttccgcttcaaattgcgcccagtattcagcgtcttcgtcgacttcctcttgcggtgcgagatcttccatccacggcagcagcacatgctccagcagacttaatacgccacgaccgtgagacgcggcgatcgggtagatttcacctaaaccaagcgagtagaaatcaaccactgcctgatcgggatccagaccgtcagttttgtttgccaccaggaaggtcggtttttcacgggagcgcagatgtttggcaatcgcttcatctgccggcatcaggcccgcgcgcgcatccaccataaacagtacgacgtccgcttcttcaatcgccagcagcgactgttccgccatgcgggtttctacaccgtcttctgtgccatcaatcccgccggtatcaatacagataaactcacggccttcaatttccgcacgaccgtacttacggtcacgagtcagacccgggaaatccgcaaccagcgcatctcgggtgcgagttagacggttaaataacgtggattttcctacgttagggcgcccgacaagcgcgaccacaggtaccatgtttaaagcctcatttttataaatcatcagacaacgcacgctatattcgcgtcgttgttaaaaacaggaaaacggcccctgtccaggagccgttttcaaagtgaacgacagagacgattaacgtgtaatagagtacacggttccgtcttttgcctggatcagcagtttgccgtcagcggcaaccggttcagtctggaaaccggaactatcaactttttgctgggcaacgaaacgaccatcttcgacgttaatccagtgcagataaccttcactgtcaccgaccaccaggttgccattatacagcaccggagaagtcagcaggcgatgcagcagatcgctttgtgtccacagcgtaacgccgccatcaatggtcaacgccatcacccggtcattttgatcgaccagatagatgcgattgccgtcgacgatgaaatcattcaccgaacccagttcgcgtttccacataatctgaccactgcgcagatcaagcgccgtcaggttaccattataggccagcgcgaaaacaacgccgttaacaacgacgggagtcgtgtcaacatcgctcagacggtcaatttcggtagaaccggtcgcctgggaaatacgctgctgccaaatcatctggccctgttccatcagcactgcgctgacgcgaccattatcgccccccacgacggccgcaccaaaagccgttgtcggcgcagactcgccacgcaaagagagcgaaggcatatcgaggttaactgtccatttgacagcgccgtcagcttcgttcagcgcttgtaactgaccgttactggtgtggattaacaccagaccgtcgctgaccaccgggcgcgaaagtgcttcacccgcgactttagtttgccatgccacagtaccatcgctggtattcagcgcgtaaacctgcgccttttcgctgccaatgtagacatgcccaccagacacggtcacaccgccagaaagtaatgcaggctctttagagaaccagccatctttctcggccaggctgacagaccagatttctttgccatcatccgcattcagcgcttttactaaaccagcgcggtccgctgcatagacaacgttgtccgccagtgccggatgaagattggaatagaagttgccaatgccgctaccaacggaagtgctccacgccgtggtcggcgtaaactggttttcaacggttggcaatggggacatctttaccacatcttcttcgctgttaaacagcgaacagccgcttaaaagggtaacggaaagcagtcctggcagcagtaatttacgcaattgcatcgggtccctctcagatggacaaattattaattttcatctgcatcatttcgctcagtgccggagtaacatcgcttttcacgcctgcttcccatgcactacgcgcaccttgcttatcacctttgctcagcaatgcttcaccacgcaggtcggcaacaatggcagcccacccttcacctttgatggtatcaagggttttcagcgcggcatcagcctgcttgagctgtacctgaacgcgagcaagacgcagatttatcacggctttgagattttcatcgctcgtgtctgccagcccctgttgtaactgggcggcagctttctctagttcatttttgtcaacaaattgctgcgcaagttccaaagaagccagcgcaccataagtatttttattttcagcagcaaatttttccgccgccgggatgctatccggtttgccttcgctcactgcggtaaccgcattttgataggcaagagaagcggagcgtgcagaatcaacctgatggctgttccagtagcgccagccaatcagtgcgccaacgcccaaaatcaccccaacagccagtgctttgccattttcagcaaaaaagcgtttaaccgcttctacctggtcgttttcgttctcgtaaatttccacgctgtccttctccttccttaacccagtaacgtgcgcaaatgcgcggctacgctatcctgcgcaactgccgtttgctcaccagagcgcaaatccttcactactgctgtgccgttagccacttcagactcacccagcaccacagcaacgcgggcaccccatttatcagcacgggcaaactgtttcttaaagttgccgccgccgtggttggtcatcaatttcacgcccggtaattcatcacgcagacgctcagctaatgccatagccgcagattgtgtatcagcacctgaagccaccaggtatatatcgacaacaggatcggctttaaattccggattaacggcctgtactaacaatacaagacgttcgaggcccatagcaaaaccgacagccggtgttgcacgaccgcccagttgttccacaagaccgtcataacgaccgcctgcacacacggtgccctgggagccgagactgttagtcacccactcgaaaacggtacggttgtagtaatccagaccacgcaccagacgctggtttacggtgtaagcgatccccgcgctctccagcagtttgcacagaccggcaaaatgctcacgagattcctcgtccagatagtcacctaatgccggagcgtcgttgagaagcgcctgcacttccggattttttgaatccagcacgcgcagcgggttagtgtacatgcggcgtttgcagtcttcgtccagcttttctttatgctgctcaaggaatgccaccagcgcatcgcggtaattggcgcgtgcttccagcgaaccgatagagttcagctcaagagttacgtgctcggaaatacccagcgcgcgccaccagcgggcagtgagcataatcagttcagcgtcgatatccggaccttgcagaccgaaaacttcgcagcccaactgatggaactgacgataacgccctttctgcggacgctcgtgacggaacatcggcccgatataccacagacgctgttcctgattgtacagaagaccatgctcgatgccggcgcgtacacagcccgccgtcccttcagggcgcagagtcaggctgtcgccattgcgatcctcaaaggtgtacatctctttttcaaccacgtcggtgacttcaccaatcgcacgtttgaatagcggggtctgctctacaatcggcaagcggatttcactgtaaccgtagctgccgagcacgtttttcagtgtgccttcaatgcgctgccagatggccgtttcgccaggcaggtaatcgttcatgccgcgaatggcttgaatgttttttgccacgtttattctctttctgaatataaaaatgaaccctcaacgcttccctcaatgtttcgggagccatgcgggttcaatcatacacgggaagcgaggcgcttcccatcacgttattatttttcaacctgctgaacgtcaattcgacgcgcttcgtccagctgactggctttcgcacgaatgcgtgcttccagctggtcgatcatatcgttgttgtccagacggtctttgcgcacgccatcttcatagaggccgcttttcttgttgccgccggtgacgccgagtgtagaaaccagcgcctcacctgggccattcaccacgcagccgataatcgaaacgtccatcggagtgatgatatcttccaggcgttgctccagcgcgttaaccgtaccgataacatcaaattcctgacgcgaacaggtcgggcaggcgatgaagttgatccctcgcgaacggatacgcagcgatttcaaaatatcgaaaccgactttgatctcttcgaccggatcggccgccagcgatacgcgcagcgtgtcgccgatgccttcagacagcagcagacctaaaccaatggcggattttactgccccgctgcgcgcaccaccggcttcggtgatccccagatgcaacggctgatcgatctgttttgccagcaaacgataagactcaacagcgaggaagacgtcagacgctttcacgctgactttgaactgatcgaagttcaggcgatcgagatgatcaacatgacgcatggcagattccagcaacgcctgcggcgtcggttcgccatacttttcttgcagatctttttccagcgatccggcgttaacgccaatacggatcggaatgtttttatcgcgcgcacagtcaaccaccatgcgaatacgctcttcattaccgatattgccagggttaatacgcagacaatcgacgccgtattccgctactttcagcgcaatgcgatagtcgaagtggatgtcagccaccagcggcacgttaacctgctgtttgatgagtttgaacgcttctgccgcgtccatcgtcggtacggatacacggacgatatcagcgccaacgcgttccagcgccttgatttgattgaccgttgcttcgacgtctgtcgtacgcgtattggtcatggactgtacggcgatgggagcaccatcgccaatcggcacattcccaacgtaaatacgtgttgattttctacgttgaattggagcctggttatgcatgaaaaatctcccgcgttacccgtctgttactgcgccggtgattgttcggcattgagggtcagacgcgcaacctggttagttctgataaaacgactcagatcgacaggtttcccttgatactggatctgtactgcggctggcgcaccaattttcagtttgtacggtgcctggccggttaagttcaaattaccgtctttacgctgcataccgctaaacaattttttaccggtagcatcagtgacctccagccagcaatcggcagtaaagttcatcaccagcgcattcggatcagccaccggcgtggtcacgccagcctgatcggttggcaacggcgcagcaccatctggcgttgttgctgccgttggtgccggggtcgcggcggtatcaacatttgcctgcgaaggcgaaacaaccgcattctgttgcggatcaacagctggtgctggcgcagttacggcaggtgtttgcgtgttggttgcggtagtatccacagacgctggcggcgtggacgttgtagccgggtctgtagttgtcgacgtatttaatggaacactctgcccctgctcgctattactgctcagttccgccgaagattgatcggccatagtggtgatctcttcctgctgagctttgcggtcttgccaccaccaggcaccgctcaggccgataaccacaaacaacaccagccaagtgaaggtcatcagccagccgtcgcgttttttgcggcgtttaccgagggaaaaactctgcatcggcgcaacttttgcagcccgaagtggagcctgcttttccagccctggcagcagttcttcttctggaatatgtaccagacgcgcataagagcggatatatccgcgcaggaatgttgaagcaagatcggcgggtgccttatcttcttcaatgtcgcgtaccgtggaaaccttcaggcaaagtcgctcggcaacggcctgctgactaagtcctagttgttcgcgagcattacgcaggcgagcgccggtagtaagtgcttcattttggtcgtgcgtggcttcagtattcattcgctgcaggtacgtttaaatgagaattgagatgccggtgaaccatcatgctcacccacaccgcgaaacatccgttaagttaaccgttatcatacagtataagaccgtctgtgtgctcgtgacaaagcccacattcactaaggctaacttactgttgcatcgttacatactgccttaaagtcagcaaaaacgcaccgttaatattgaccagacaattgcaacttaatacttcattcataaaacattacgccacggtacataaagtaaccgtggcgtaatggctatcagaccgctttaatgtcgatggcttcaccctgcatccgtttacgcagggtacgtttcgtacggtcgataacatcgcccgccaactgaccacaggcagcatcgatatcatcaccacgagttttacgcacaatagtggtgaaaccgtagctcatcagcacttttgagaaacggtcgatacggctgttcgagctgcgtccatacggcgcacccgggaacgggttccacgggatcaggttgatcttacacggcgtatctttcagcagttccgccagttggtgcgcgtgttcagtgccgtcgttaacgtggtcaagcatcacgtattcaatagtgactcggccctgattggcgttggatttctccagataacggcgcaccgcagcaaggaacgtttcgatattgtactttttgttgatcggcacaatttcgtcacgaatttcgtcgttcggcgcgtgcagggaaattgccagtgcaacgtcgatcatatcgcccagtttatccagcgccggaactacaccggaagtggaaagcgtgacgcgacgtttagacaggccaaaaccgaaatcatcaagcatgatttccatcgccggaacgacgttgttcaggttgagcagcggctcgcccatgcccatcatcactacgttagtgatcggacgctgaccggtgacttttgctgcgccgacgattttcgccgcacgccacacctggccgataatttccgacacccgcaggttgcggttaaagccctgctgggcggtggaacagaatttacactccagcgcacaccccacctgcgaagagacgcagagcgtggcacggtcgtcttccgggatatacaccgtttcgacgcgctgatcgccaacggcgatcgcccatttaatggtgccgtcagatgaacgctgttcttcaaccacttccggtgcgcggatttccgccacctctttcagtttgccgcgcaacactttgttgatgtcggtcatctcatcaaagttgtcgcagcaatagtgatacatccacttcatcacctgatcggcgcggaagggtttttcacctaaatctttaaaaaactcccgcatctgctgacggttgagatccagcaggttgatttttccatctttcgtggtgacgttttcaggtgtgactaattgttcagacatatgctattccggcctcgttattacacgttatggcccctggagggttgaaaaaagaaacgccccggtgagcggctgctcgtccgggggcgctgcattgtacaaattctggcgcacggatgccacgtttgcacgcggcatttacgaaattattaacgggtgcgcgggcacacttcgccttcgccaaagaaataagcgatttcgcgagcggcagattcgacggaatcagaaccgtgggtaccgttttcggtcaggctgtcagcgtaatcagcgcgcagagtaccagccagtgcgtttgccggattggtcgcgcccagcagatcgcggtgacgctgaacggcgttttcaccttccagcacggaaaccacgatcgggccagaggtcatgaattcaaccagaccatcaaagaacggttttccatcgtgttcagcataaaagccacgtgcctgttcaacggtcaggtgcagcattttggtgccaacaattttgaaccctgcagcttcaaagcgcgcaaagatattaccaatgacgttttttgctaccgcgttcggtttgatgatggaaaaagtacgttcaatagccatttttacctctgtaaattgttctgttgttgtctgtaccagcgtacgagatggcgcggattataatgagcaacagggccgttgactattgatgaaggtaacatttttttaaaataaaatgagttttagcaacaatcagggacaaaacagactattgcatgacaaatttcactgtcgcgatttgccccacgtcatccatcaccagcaattgataatcacctttatccgtcaaatgcagggtcacgttgcgcccgcgttcagttaacggttcgccattcagaaaccaccagcgttcacctgcccctccacttgattgcaacggcaaagtcgcttccgctgcgcccggtaaacgtttaataatcgcgccatcgcgaacgcctgtcagctgcagcgggagctgggcatcgtgaccgtatggcgggcaacttgtcgaggccggtggtaagcgcacagcgcgacgttctgatgcgggcagccagggttccagcggtagcggccagacatttatcatttcttgtcgcgcttgcgggcaatcagcggcaacacgtttgccattttcatccagccagatggggaaacgaatgccattaatgccttcctgctccggcagtaatagagttggcggctgactcccgtccagcagccaggttgccaggcggcggcgacagttaccgtcaccttccggcaaagactgtccgcccggccagcagataacgccacgagtgactgagttcgggcgcgggtcttccggcagattcgcactgcgcgacagtaagatattattgacctgattcaacaatggtacggcactggcaaagccaaactgaccaacaacgggcgtgccgtccggtctgccagtccagatcccaatgacatagcgagcgttaaccccaatcgcccaggcgtcacgatagccatagctggtgcccgttttccatgccagtggggcgacgcgcggcaaggcactatccggcaagggttgcgcttcatcagccataatccggcgaatgatccacgccgcccccgacgacattaaaggccgttcaagcagcggatcgtcaggctgtaagcgcaatttgcctgccttgccgtggcgagcaaacgcggtatacgctgccgccatatcttccagttttgcaccagcgccgccgagaatgagtgaaagattcggcgcagcaccgttgggcaaatataacggcaatccaacattgcgtaactttgccgcaaaccgtttcggtccataggcttccagcacctgcacagcaggtaagttcagcgagcgcaccagcgcctcgctcatgctgatcgggccatgaaaaccgctatcaaagttacctggtcgataatcaccggtgcgccgggggacgtcttgcagcagtgatgccgggtggatcaagccttcatccagcgccagaccataaacaaacggtttgagcactgatcctggcgatcggatcgaattgaccatatcaacatgaccaaagcgtgaatcatcgttgagatcaaccgatcccacccagccgcgaacacgcatatcggtatgatcaaccacgatcatcgccagtgagctgcgcggtggcaaccgccctttccagttttgcgccagttcttccagacgtcgttgaagaccggcatccaacgtagtagtgattttgtcgcttttgcttttaccgagcatcatgcgcgaaaacagcggtgccagttgcggcatttgtcggggggccagccagatgggttcttcccttgactcttttacctgctcacgggaccacacaccttgcacggccatccgttcgagcactttattacgcgcggcttcggcacgctccggccaacgatccgggcgaagacggctgggcgcttgcggcaaaaccgccagcattgccgcctcggaatagcttaaattcgcaggcgattttccgagataagcccaacttgccgcaccgatcccctgcaacgtaccgccaaacggagcgcggttaagatacaaggtcagaatttcacgcttagacagatgccattccagttgcaacgcgcgccagagctggcgaattttgccgccaaatgttttggggtgaggatcaagcagacgagcaacctgcatagtgagcgtgctgccaccggaaataacccgtcccgaagtgagatcttgccatgctgcgcgcgccaccgagaatggattcacccccggatgcttccagaaccagcgatcttcataattgatcagcgcttcaaggtaacgtggagaaacatcttcgattgttaccggataacgccagatgccgtcagcatcggcgaagcgccagagcggcgtaccatcctgcgccacgaccactcgtgcgggattgacttcatgcagcggtagaggccagagtttatctgctccccacgctgcaagaaaaaggagaaagggcgcggctgccaacgttatccagcagccgcgtttggttaacaagcgaggcatttacggtctgacaatcagcagatcttcagccgcgccggtcgcccgccattggggaacatacattgattccaccatcggttgcggtacctgatacgttcccggcgtcaccgcccgcgccagatacaccagcgttaccggttggtattcatcaacggcaaccgccgccacaaagcgatcgtcacggaactcaatgtgcttaatgctcgcctgctgcatctggttcagtaagttctgcacttcgccaccactttgctccaggctggcgctaccgttcgccagattctggttttccagttccagacccgcaggcagcagatccacgactaacgcatccggcacgctgttactggcttttacctgcaaccacaccagcaccagatcgccgctacgtaacgagtccagcgatttgctcttaccatcagtaccaagaatatgacgctcgatttgcagcacattgttcgccggtaaaggtgcggattgcggataaccgctggcatccatacgcaaccataacggctgatcgccactgttgctcacctgcaaggtgacaagttgatcgctattcagattgctgttttgcgctttctcgcctgtcagctgctcagctgagaaagaggtttgcgcctgccatttaccgggtaaatcctgaatcgtacgggcagccaggaacaacgcgttactttcctgcgtcgatagccagcgttcaccaaacgcctgctgcgaaagtgtgttcagcaaagtgtactgctcatcgggtagcagtttattttcttccagcaaggagagcattaacgcgttgtcgcgcagtgaactaccgtaatcacccagccatatccgctcatcactattacgcggcgttttcagcgccagcgcaatcgcttcttcaccacgcgtcgcatcacccatggttttcagcgcaacgccaagttgcagcagcggtaaaccagaagcggcatctgcacgatgctcccagatttcacgcagcgcacccagcggagccttttgctgacgggccaacaccagcgcagcgtaagactgtacggcgaatttactggctttgagattatccgcgtacgggatcgacatcatgcccggatcttgtaaatagcgcagcagacgctcattaccccggttaatggcgtctgtcggcacgctgtaaccctgttcgcctgcgcggaccaggaaatccatcacgtaagccgtcagccagtactcttcgtcaccgtttttatcccacagcgcaaagccgccgttatcacgttgcatttgcagcaaacgggaaatgccgatatcgaccgatgcacggcgtttctcatcactgtcgcctttgatgcccaacgcctgcagttgggctgcgttggtataaagtgacggaaacaggccgctggcggtttgctcaagacagccgtacggatacgcttttaactctttgatataacgtgcgatgttcagcggtggtttgccgctcaacaacaattgcccttccagcgtaacaggcgagaagttttgcaatccatccgccggaatcgcccatgtctcaccaggctgtaacgccgtaccgtaattaaccgtttgtgccgggaacgccggacggacgccgattttccactgcttatgctgatcggcaacggtttcacccggtaacgctaacccgctaatggtggcctgaatttctccatcgccataacccggcaatgctcgcaccgggataaacagcgtagtacgcacacctggcgctaattcaacggctgcgggtgaatcgctgaccagttcaagcaaaccactggcggtcagggcaacgttcagtttttgcggtttatcggtaagattagtgatatccagcgtcagacgcgaggtatcgccactcgccataaagcgcggcatgttcagttcagcaatcaccggtgcggcaactatcactttactttcgttgctaccgaagtcatctgccgtccaggcttgcgccatgacgcgcaattcaccgttaaaatcgccaatcggcagtgtaaccgagccttcgccctgttcgttgagcgttaccggcagcgcctgctgcacgacaatattgacgtgattgaccggcggtttaccaccacgtttcagctcatcaccatcgccaccgaaacgcagagctgccagacgcccctgaccttcaataacctgaccgtaaatatcgtaaatgtctgcgccatagcgtttctgaccaaagaacgcctgccacggatctggcgtgacgtagtcagtaatattcagcacaccactatcaacggcagacaccagcacattcacctgtttaggcttctcgccatttttagtgctggctttaattttcacggttaatggttgattgggacgcatttttgctggtgtttccagcgccagatcgaggcgacggttttcatcgccaagcggcagatgcaacacaccaaccgcgcgttttggcgtcgcggagcgagatttatcgccaggacgtaccaccagcgtacttaaatacagatcatgacgattccaggttttatcgaccggaatcgtcagatccagcccttgagcccgaacatcaatctcttgccaccacagcggcccttcactggactcgaccatcgcataacctttacccgccgttggcgcggcgatatgcaacttaatggtgtcgccagggcgataactggctttatccagtttcagcgtgacacggtcgggtcgcactgcgccgctaccgtcgctgttgtcctgccagctatagccagcccagaaacgaacactactgaccgcttcattcggcgctttgacttccagacgataagcgccccactctaccggaaaactgaccttgccggtttcgtccgctttcagatccagagtttgttcattttcgatcagatctttttgatcaaactgtgactgccagccttcatcttctgaccagttccagtagtaatcgcggcgttcgcgaatcaggcgcacctgcaagcccgacacggcttttttcacgccttgcgcatcgctataaacgatgtcaaaagcggcgttactgccttcatcaacaatgggctgtttcaccgtgctgtcagtacgataatcgtaaaccgatttcgaggcgaactgcggacggatccccggcaatgcatcggcaggccagatagcctgctcagcgcggcgcgtcaccgggcgaccgcccgattccagcaaactaccctggaaaataacctgtaatggggaatgcgtttccttccactggctttctgtagaaacttcgccgcgccctttatcatccagcgtcaactgaacttcatccagcgtgcgggaaagattttcggcagctatatcgccgaattcaaaaccaggtaaggctgacacagcttcacgcagtgggcgcaggaaaagttgcccttgcaaagtattaccattagcaggtgcaccatacaggtagtaccccaccacggagaatttcacttcatctttcggcgttagcggggttttctcaccggtcagattcagcgccatgcgctctggcataaaatcttcgacgtggaaatcccacatccgatactgattatcgcccgtgttagcgcgaatatgccacataccggttgccgcattgctatcgagtggccaggtaaagtggtagaggccattctccggctgactaacgacgctcctgagtacctgcccatcgggtttaatcacgtctaacttgatgggttgattgggcaacgctttaccgtctgcatcacgcagcaaaccattgaggattaccgtttcacctgggcgataaagatcgcgtgggccaaacatgaaaaactgtttgctatagcctggcgcgccagcaatgttaaattctgctaagtccagcgccggaagttttaaatcgagtagcgttgtctgaccgtctttacgcgccaacagtaatgccgcgtttttatcattttccagctgcacatgcccctgagcgtcactggttgcctgagtcagagtctgccctttctcatttaataaagagacttcaattccttgctgggccgcgccgttttccagactttgggtaaagatatccagacgattgtgataacggtgagctgaaacgccgatatcacttaacgtaaacagcgtcgcgggattactgtaatcgtaacgtccagcctgattcatcacagccagatacacgcccgcctgctgaagcggtttgatatcgcccagcggcagcaataatttttcacgggtgttacgcgcaggattgagatcaaaccgtccggtgtagaccagatccgccatctgcagcagtttgtctgactgccagttcgccagcgaattgcggtattcccattggctaatgaatgctggcagagattctggcttaacgcggaagaagttaacatcgacattattaacgttgagcgccattaccggcagcccttcaacgactttgccaggcagcagcgaaccacggctggcaaaaccgacgctgggttggatgtcgcgggtagttatagttttttcgtaatctttactgaaggttgcgttgttgagtgctttgacctccttgccaatagtaacgatcaaatcacgtttcggttcgaggtggcgtaaacgtaactctttaagattatctgacagctcccaggcaccatccactttgccgctttttttatcgacgacatgaataacgcgtgagaaatcctgatccgggtcgagagggatggagaacgtcagcaccagcgtggctgcaccatcaagttggacttcagagagatccagcaatgtcagcaccttaccggcactctgttgggccagtttttgtctctccggcacggagagttttgctgaactcgcgttttctgaagaggccgctttagtaacttcagaaggcgcatcttttttcaccgctgttggcgcgttatcgttgttgtcgcaccctgccagcgccagcattagcatgcaggcggctacgcgtaactttttcatttttcatccctgccacaatggcccgttagcaacgtcgaataattattatgcgtgagaatttacgttatgtaattcagtatcacgcccatacaatccgaattttagtgagaattgtggctcagacagccaaatcagcctcttttgcttgtcgcttttcactaaacatccgacaatttagcctaaccccggcaaaaatggagatgcctatgtccacgacatggtttgtaggagccgactggctcgccgaacatattgatgacccggaaattcagattatcgatgcccgcatggcgtcgcctggacaggaggatcgtaacgttgctcaggagtatctgaatggacatattcccggcgcagtgttttttgatatcgaagcgctttctgatcacacttccccgcttccgcacatgctgccgcgcccggaaacgttcgccgtggcgatgcgtgaattaggcgttaaccaggataagcacctgattgtctatgacgaaggtaatcttttctcagccccacgagcatggtggatgctgcgcacctttggtgtagagaaagtgtcgattctggggggtggacttgcaggctggcagcgcgatgatctgctgttagaagaaggtgcagtagagctgccggaaggagagtttaacgccgcgtttaatcctgaagccgtggtgaaagtaaccgatgtattattggcaagccatgaaaatacggcgcaaattattgatgcccgcccggctgcacgttttaacgcagaagttgatgaacctcgcccaggtttacgtcgcggacatattcccggagcactgaatgttccgtggacggaactggtgcgcgaaggcgaactaaaaacgaccgatgaactggatgcgatattttttggtcgcggcgtcagctacgacaaaccaattatcgtcagctgcggctctggtgtaacggcagccgtggttttgttagcactcgcgacgctggatgtgccaaacgtgaaactgtacgacggcgcatggagtgaatggggcgcgcgggcagatttaccggttgagccagtgaaataagtattttacaggcaataaaaaaccgccgaatttggcggttttttattgctagtctggttcgcggcctttccagcaggttgacttgtgttacatgagcaacgcaggtgcttcacagcaaaacaatactcaccagtaactctctttttgtcaagcaaaagagagtaattattgtttatttagcgtattatcgacaccggccctttccgccgtgttcggtaataaaataacctggcttattagtccgaattcagacaaatataaataaatcctgctcaaaattaaaaattctaaccggtaaaagatattacttaaacatgtaaattcactttcctttaaaaaacaaaaaaccgccaaaatcaggcggttttttgttgctggtccggttcgcggcctttccagcaggttgtattaccgtagtaatgcaagcgcgtctcagcggagacaatactcgccagtaactctctttttgtcaagcaaaagagagttattattgttctgttagtgtattatccactgcggccctttccgccgtctcgcaaacgggcgctggctttaggaaaggatgttccgtggccgtaaatgcaggtgtttcacagcgcttgctatcgcggcaatatcgccagtggtgctgtcgtgatgcggtcttcgcatggaccgcacaatgaagatacggtgcttttgtatcgtacttattgtttctggtgcgctgttaaccgaggtaaataataaccggagtctctccggcgacaatttactggtggttaacaaccttcagagcagcaagtaagcccgaatgccgccctttgggcggcatattttagattatccgattctgtttaaagtcacgcaaaaaaccaccccagcgacgttcatagaatggcgcaatatgttcggtaataaagtggctaattcctttttccccttttttcacctgacaaatatcgattggttcatcgccaggtaatgtatcggtcgctacacttcccgtcgcctgaataatttcttcgatatcaccatcggcttcaatgccaataagtaaattaggctgtgcctcttcgttctctttaattgaacaaataaaagcacgcttcaccggcttaatggttttaaataaggtggtgagtgaatcaatcatttgtgctggcggctctgcgacttccgataatatcagcgattcaccgccttccaggatttcctggctgctcagcggatttccctcttcaccaatcaacaaactgatttcacgcggcataaattctttaccggttggcagtttggcattaaggaagagcgtttcgccaagtgtcatctcaaacagcgtgcgaacgggcattacgacaaatgcctgttcgtcttcaaccgcctgttgaagtgcttctaacgaggtgaaaaaaggaatgacgctggtgccgtcttctttttcccagtgctgtaaatcaagcgcgctatcttcaaccacagcctcgccctgcgccgccgtaccaggcacccagacggtggattccagtagagtacggaaaaaggccgggcggtgcgccggttcagttgctgctttttccagcaggtcttcaagttcgttttttgtttcggacataagaaccacaattcattcaacgttcggggcgcaaatgcctgatgcgctacgcttatcaggcctacaagggattcgcaatttgttgaatttgcagaatttgtaggccggataaggcgtttacgccgcatccggcatattagtttacgccgttaacagattagctatcgtgcgcacaccaagtcccgtagcgcccgcagaccactgttcaaccggcgctttacggtaagtcgccgagcagtcgatatgcagccagccttgctgatagttctcaacaaagtgcgacaggaagcccgccgccgtgctcgcgcctgccggatacgccgcgcttccggtattgttcagttcggcaaagttagacggcagctggctgcggtggaactccgccagcggcagacgccagaacggttcgttctcctgcgcggcactcgccagcaagcgaccggccagcgcatcgtcaaaactgaacagcgcgtgataatcattacccagcgcagttttcgccgccccggtgagggtcgccgcatcaatgatcatttccggtttctgcgcactggcatcaatcagaccatcggcaagcaccagacgcccttcggcatcagtgttcatcacttcaacttttttaccgttgcgataggtgatgatatcgcccagcttgaacgcattgccgctaatcaggttatccgcacagcagaggaacagcttcacgcgcttgttcagtccgcgcgtaatggcaaatgccagcgccccggtaaccgttgccgcgccgcccatgtccgacttcatcgagtccataaacgcagtctgtttgatgctgtagccgccggagtcaaaagtgatacctttacctaccaggcacgcgtacactggcgcttctttatcgccagttgggttgtaatccagcgccagcaataccggagaacgttctgaaccgcgtccgactgtgtgcagccccatataaccttgctcacgcagatcttcgcctttggtgatccgataagtcacacgatcgcccgcgacgttgctgatcagatcaacagcacgctgtgccagttgcgatggtcccaattcttctgccggtgcgttgatggtgtcacgcacccagtcgatgatcatcaggcggttatccagttcctggcgctgggcatcgtccagatccggccacaccactttacgcgtgcctttcggggctttgtaaccttgccagaatgcccagcagcgatccgcatcccagccttcaccgcttaactgaacatgcttgatgcccagaccgtcaatcttgcgcgccgcacgctggatcagccccagatcgtctgccccgttcaaatgcagggtaatgccgtcattattaatgctgtaagttgctttttctccccagcgcgcgtcggcaggttgggtagagagggtaatcttcatcgcttctgtcattttagttatccttctttgtaaaagggccgccagttggcagccccaggatttttccgctaaatgattcgcgttgcaggaaggcggcaagtgagtgaagccccaggagcatagataactatgtgactggggtgaacgagcgcagccaacgcatctgcggcgtgaagcatgacgcggaaattattcggcctcgtccagccagactaacaaaatcgcttcgaggattttctcgttggatgcctgcgggtcgtcgtcgaaatcttccagatcgcaaatccactgatgcatatcggtgaatcgaaccgttttcggatcaagatcgggatacgcatcgtacagtgcttcgccaatttcgcggctatcggtccacttaagtcccatactaacctctgttaatgctcacgcgcatggttgatagtgtaacgcgggatttcgactactaaatcttcgtcggtaacgcgcgcctggcagcttaaacggctttccggctccagtccccaggctttgtccagcatgtcgtcttcctgctctgagctttccggcagtgagtcaaaaccttcacgaacgatgcagtggcaggtggtgcaagcacaggatttttcacaggcgtgttcaatctcgataccgttacgcagagctgcgtcgagaatggtttcaccgctattagcttccagaacagcgccatcagggcagagatcctgatgaggcaaaataacaatctttggcatattaaacctcgtccacggaatggcctttcagcgcacgacgaaccgactggtccatgcggcgagcggcgaaatcctgggtttgtttgtctacgtttttaatcgcttgttcgatggcgtcaacatcatcgccctgcgccacttcactcaggtgagcggcagcatcgtcaatgacctgacgttctgcggcgcttaacagcgcggcatcagcagccagcgcgccgtgcagactttccagcacacgcgccgcttctactttttgttctgccagcattcgggcttttacgtcctgctcggcatagctcattgagtctttgatcatcgaagcgatttcgctatcggtcagaccgtaagacggtttgacctgaatagacgcctcaacgccggtggatttctccatcgccgtcacgctcaaaagaccgtcggcatcgacctggaacgtcacgcgaatatgcgcaccgccagccggtagcgccggaataccacgcagcgcaaaacgcgccagtgagcggcagtcctgcaccagttcgcgctcaccctgcattacatggatagacatcgccgtctgaccatctttaaaggtggtgaaatcctgagcgcgggccaccggaatagtggtattacgcggaatcactttctccaccaggccgcccatcgtttcgaggcccagcgacagtgggatcacatcaagcaacagcatttcgctgtctggcttgttacccaccagaatatccgcctgaatcgccgcgccaatagcgacgactttatccgggtcgatggaagtcagcggtggacgaccgaaaaattcgcctacccgttcacgcaccagcggcacgcgagtagaaccgcccaccatcaccacttccagcacttcatcagcttctacacccgcgtctttcagcgcgcgacgacaagccagtaaggttcgttttaccagtggcgcgatcagttcattgaattgttcacggctgatttcgccctgccagcccgcaacgttaacggtcacggagtccgcatcgctcagcgcgattttggctgcaatggcggcatccagcagttcacgctgaacgcggttatcgctacgatcaggaatgcccgcctgctcgcgaatgtaatccgccagcagatggtcgaaatcatcgccgccgagcgcggaatcaccgccggttgccagcacttcaaacacgccgcgacttaagcgcagaatggaaatatcaaacgtcccgccaccgaggtcataaacggcgatcacgccttcctgaccggaatccagcccgtaggcgatagccgcagcggtcggttcgttaagtaagcgcaggacgtgaaggcccgccagacgcgccgcgtctttggtgccctgacgctgggcatcgtcaaagtacgccggaacggtgataactacaccatccagctcgcctgccagggcttcagttgcccgcgccgccagtgctttgaggatgtccgcagaaacgcgcaccgggttcagcagccccgccgccgtttcaatcatcggcaggccgttttcgctggcctggaattgataaggcagatgcggatagcgttgctggatatcagccagcgagcgtcccatcaggcgtttaacagaactaattgtgttggcggtatcgagcgctgcattagtacgcgcgtcataacccaccgaatgcccttgctgttgatagtgaacaacagatggcagcaggtgacggccttcatgatcggctaacgtttcggcctgaccgctgcgcactgtcgccaccagcgagttggttgtgcccaggtcaataccggccgccagacgacgctgatgcggcgcagcactcaaaccaggttcactaatttgtaataaggccatgtttagcttccagaaattaaaaatcgagcagtttttcttcgagttgttcggcactgcttcgcagtttatcgagaaaacgcagcttacgcacggtatccgccgccgcgtcccacgtctcgttgtctaactgttcaaccatcaactgatggcgggtatcaaacatctttttcacacgtttgataaagctttccagccgcgcttcatctttcgcctgttcgatctcgtccagctcttcgcgcagctccaactgttccatcaggaacgcggtgtcgcgcacagtatgctgctcgctggcgagatcaaagccgtgcaaagaaagcaaatattccgcgcgcattaacggatgacgcagcgtttgccaggcctggttaatggttgcagattgctgtacggcggcgagttgttccgcctggcttccgctggcgaatttatcaggatgatactgacgttgtagatcctgaaaacgcaggctcagcgcctgggtatcgagttgatagcgggcaggcaagccaaagagggtgaagtaatccataacattctcagggctgcgatccgccgcgataacggcgaatcaggtaaaacaaaccccacgcgcaggcgaccacggtggggttatcggtatgcgcatcaaacgtggaagctttcgccgcaaccacactcatctttgacgttcgggttggtgaatttaaacccttcgttcaggccttcttttacgaagtccagctgcgtaccgtccagaaattgcaggctcttgccatcgaccacgactttcacgcctttgtcttcaaacacgatgtcttccggcgtcggttcgtcaacaaattccagtacataagccatacctgaacacccggaggttctcacgcccagacgcaggccaaaccctttaccgcggttagccagaaaggtatttactcgcgctgctgcactgtcgctcagtgtaatcgacataaccaaacctcaactcttattttgcttcacgtttgcttttatagtccgcaatggcggctttgatcgcgtcttctgccagaatagaacagtgaattttcaccggcggcagttcaagttcttcagcaatatcggtgtttttgatcgcctgcgcttcgtcgagagacttccctttcacccattcggtgaccagggagctggaagcgatagcggaaccgcagccgtaagttttaaaacgcgcgtcttcaatgataccttcatcgttgactttaatctgcaacttcatcacgtcgccacaggccggtgcccccaccatgccgctgccgacgttctcgtcgttgttgtcaaaggaacccacgttacgcggattctcgtaatggtcgataactttttcgctgtaagccattataaattctcctgattccgataccgattaatgatgagcccattcgatgctgttcagatccacgccctgcttgtacatttcccacagcggagaaaggtcacgcagacgaccgatggatttacgaactaactcgatggtgtagtcgatctcttcttcagtagtaaaacgacctaaagagaaacggatagagctatgtgccagctcgtcgttcagccccagcgcgcgcagcacgtaggacggttcgaggcttgctgacgtacaggcggaacctgaagaaactgcgaggtctttcagcgccataatcagcgactcaccttcaacgtagttgaagctgacgttgagaatgttcggcgcaccgtgttccaggtcaccgttcaggtaaacttcttcgatatctttgatgccgttccacagacggttacgcaggccgcgcagacgttccatctcggtcgccatctcttcttttgcgatgcgataggcctcgcccattccgacgatctggtgaacaggcagagtgccggaacgcataccgcgctcgtgaccgccgccgtgcatttgcgcttcgatgcgtacgcgcggtttacgacgtacatacagcgcaccgatacctttcgggccatagattttgtgaccggagaaagacatcaggtcaactttcaactggctcaggtcgataggcagtttacccacgctctgggttgcatcaacgtgatagataatgccacgagcacggcacatttcgccgatagccgcgatatcctgcaccacgccgatttcgttatttacgtgcatgatggacacgaggatggtgtcgtcacgcatcgctgcttcaagttctttcaggtcgataatgccgttacgctgcggtgccaggtaggtgacttcaaaaccttcgcgctccagctgacggcaggtatccagtaccgctttgtgttcggttttgctggtgatgatgtgcttgccttttttctgataaaagttggctgcacctttgatcgccaggttgtcagattcggttgcaccagaggtaaagacgatttcacgcggatcagcgccgaccagatcggcaatctgattacgggcgatatctaccgcttcttcagcctgccagccgaaacggtgagaacgggaggccgggttaccaaaggttccgtccatcgtcataaactgcatcattttctcggcaacacgcgggtccaccggcgtggttgcggagtagtcgagataaatcggtaatttcattgctctataaactccgtacatcactcaatgcaaggaatcaggctaccggctggatgtacgaccgtgtttacggagtatttagcactccggcctgattctgaattctttttattaagcgcgtaacttaacgtcgatcgcgtcttgtgtgcgggtgcgtggcgcgtcgtgagtatgctgacgaccagacacatccagcacttcctggttattaaccagttcgcctaaagtaatgttgttgagaaaaccggtgagacggtcgctcaaatcacgccacagcgcgtgggtcaggcatttatcgccgccctggcagccgcctttaccctgacaacgggtggcatctacagattcgtcaacggcgctaattacttcgccaacggcgatgctgctggcatctttgcctaacagataaccaccgcctggtccacgtacgctggaaaccagaccatttttacgcagacgggaaaacagttgttccagataagaaagggaaattccctgacgttcggaaatatcagccaacggtaccgggcccgcttcagagttgagcgcaacgtcaagcattgcggtcacggcatagcgccctttagatgtcagtctcatgtcttacttcacctcaaactcgcccctgcccggggttttttattgtaaaagtgggggtattgcatagcagggtcaagtctgacattcccgagtaaattggtcaactatttacttgactgatttagtcgggtatttaaccttcagtgccatttttttatcgtggcgtttgtacctgttgtcggatgcggcgtgaacgccatatccgccctggggttctgtacactgtaggcctgataagacgcattacgcgtcgcatcaggcaacggctgtcggatgcggcgtgaacgccttatccgacctacggttctgttcactgtaggcctgataagacgcattacgcgtcgcatcaggcaacggctgtcggatgcggcgtgaacgccttatccgacctacggttctgttcactgtaggcctgataagacgcattacgcgtcgcatcaggcaacggctgttattcggccttgttacctttattctgctgctcaatagaagccagaatcccgcgcaggatattcaactcctggctttccgggcgcgcacgggtaaacagacggcgcaatttattcatcacctgccccggatggttttcacggataaaaccggttgccagcagcgtttgttccagatgaccataaaaacgctccagatcatcgaccagcggatacggcgtctcttcatgctcgacctgctcgccgttttcctgagttgccagccaggccatgcgcacttcataggcaataacctgaaccgccatcgccaggttcagcgagctgtattccgggttagccgcaatcgcgacatgataatggcatttctgcaactcttcattggtcaagccgacgcgctcgcgaccaaacaccagcgccaccggggtatttgccgcttcagcgacgcttttcaggccgcattcgcgcgggtcgagcatcggccatggcagcgtgcgggaacgtgcgctggtgcccaccaccaggctacaaccggctaacgcttcgtcgagcgtatcgacgatgtgagcattaccaatcacatcgctggcccctgctgccagggcaatcgcctgggagtcgggtttcaccagtggattaaccagccacagattggttaatcccattgttttcatggcacgggcaacagaacccatattgccggtgtgtgacgtctccaccagcacaattcgaatattttgcagcattgtctttcttcatctaaagattattcacgcatcttatcataaaacgaagacagatgccgatctcgctgctatactctgcgccgttttcccgttctttaacatccagtgagagagaccgatgcatccgatgctgaacatcgccgtgcgcgcagcgcgcaaggcgggtaatttaattgccaaaaactatgaaaccccggacgctgtagaagcgagccagaaaggcagtaacgatttcgtgaccaacgtagataaagctgccgaagcggtgattatcgacacgattcgtaaatcttacccacagcacaccatcatcaccgaagaaagcggtgaacttgaaggtactgatcaggatgttcaatgggttatcgatccactggatggcactaccaactttatcaaacgtctgccgcacttcgcggtatctatcgctgttcgtatcaaaggccgcaccgaagttgctgtggtatacgatcctatgcgtaacgaactgttcaccgccactcgcggtcagggcgcacagctgaacggctaccgactgcgcggcagcaccgctcgcgatctcgacggtactattctggcgaccggcttcccgttcaaagcaaaacagtacgccactacctacatcaacatcgtcggcaaactgttcaacgaatgtgcagacttccgtcgtaccggttctgcggcgctggatctggcttacgtcgctgcgggtcgtgttgacggtttctttgaaatcggtctgcgcccgtgggacttcgccgcaggcgagctgctggttcgtgaagcgggcggcatcgtcagcgacttcaccggtggtcataactacatgctgaccggtaacatcgttgctggtaacccgcgcgttgttaaagccatgctggcgaacatgcgtgacgagttaagcgacgctctgaagcgttaatgactcaggcgggtgatatcactcacccgccctcgcctttcaggcgctattccgaaatacttcctcactgctttactttctttcgtcactctcccaccatctttccccgattaatggatgataaagaagtcgcaaggaaaggttatggcactgccagtgaacaaacgcgttcccaaaattctgtttattctctttgttgttgccttctgcgtttatttagtgccgcgcgttgccatcaacttcttctattatcccgacgataaaatttacggtcccgatccctggtcggcggaatccgtcgaatttacggctaaggacggtactcgtctgcaaggctggtttatcccttcttcgacgggccctgctgacaacgccatcgcaaccatcattcatgctcacggcaatgccggaaatatgtccgcccactggccgctggtcagttggttacccgagcgtaatttcaacgtttttatgtttgattatcgcgggtttggtaaatcaaaaggcacgccgtcccaggccggattgctggacgatacgcaaagtgccatcaatgtggtgcgccatcgcagtgatgtaaacccacaacgtctggtgctgttcgggcagagtattggcggggcgaatattctggatgttattggtcggggtgatcgtgaaggcatacgtgcggtgatcctcgactccacatttgcctcttatgcaaccatcgccaaccaaatgatccccggcagtggctacttacttgatgagagttacagcggcgaaaattatatcgccagcgtcagcccgatcccgcttttactcattcacggtaaagctgatcacgttatcccatggcagcacagcgaaaagttgtatagcctggcaaaagagccaaaacggttgatcctaatcccggatggcgaacacattgatgctttttccgatcgtcacggcgatgtttatcgcgaacagatggtggactttatccttagcgcgttgaatccgcagaactaacccatgatcgctagcacgataatcattcacaaaaccaccttaagacatgctaatccactggtcagaacagtttaagatgagaaaaattctgtgacgcttgccaacatttctgatgattagcattcccttcgccatttccttgagcaaactttagctattcttatcaattatgcttatgggagatctacagatgatgcctacgcttgctccaccatctgtcctttcggctccccagcgccgctgccagatcttgctgacgctctttcagccggggttgaccgccaccatggcaaccttcagcgagcttaatggtgtggatgatgatattgccagtcttgatatcagcgaaacaggacgggagatcctgcgctatcatcaactcacactgacgactggttatgacggtagctaccgggttgaaggtacagtgcttaaccaacgtttgtgtttatttcactggctacgacgtggtttccgtctgtgtccgtcatttattaccagccaattcacccccgccctgaagagtgaactgaagcggcgcggaattgcgcgtaacttttacgacgataccaatctacaagcgttagtgaatctctgctcccgacggctgcaaaaacgctttgaatcgcgcgatattcatttcctgtgtctgtatctgcaatattgtttgctgcagcaccacgctggaattacgcctcagtttaatccgctccaacgtcgctgggcggaatcctgccttgaatttcaggtagcgcaggaaattggacgccactggcagcgtcgggcgctccagcctgtaccacctgatgagccactgtttatggcactacttttttccatgttgcgggttcccgatccattgcgggatgcgcatcagcgggacagacaattgcgtcagtctatcaaacgtctggtaaaccattttcgtgagctgggaaatgttcgtttttatgatgaacaggggttatgtgatcagctttatacccacctcgcccaggcgttaaatcgcagtttgtttgccatcggtattgataataccctgccggaagagttcgccagactgtacccacgcctggtgcgcaccacccgcgcggcgctggccggatttgaaagtgaatacggcgtccatctttctgatgaggaaagtggtctggtcgcggtgattttcggtgcctggctaatgcaggaaaacgatctgcatgaaaaacagattattcttcttaccgggaatgatagcgagcgagaagcgcagattgagcagcagttacgcgaactaacgttactgccgctcaacattaagcatatgtcggtaaaggcatttttgcagacaggcgctccgcgtggcgcggcactgattattgcgccttataccatgccattaccgctcttttcaccaccgctgatctatacggacctgacgctgacaacacatcaacaggagcagatccgcaaaatgctcgaatcagcatgagggaacaactttcgggcgcaaaaacattgccggaagcgccaccagcgccattacccagaacacgccgtggcccagatattgatacaggaaaccggcgaaaacggtcatgatagcgatactgccgcccatcgcgacggcagagtaaaccgcctgtaaacggatgacttcgctaccctggcgagcagcaatataacgcatggcggccaggtggcagaccgtgaaggtgccgcaatgcagaatttgcaccactatcaaccacggcaacgccgtagttgctcccataatgccccagcgcactacgccgcaaatcgccgagatcaacagcatatcgcgtgcactacaacggcggaaaagtttattactcagcgcaaagataatgacttccgccaccacgcccagcgaccacaaataccccaccgccgaggccgagtagccagctgcctgccagtaaatggcgctaaaaccgtaataggccgcatgtgccccctgcaataaacaaacgcaggccagaaagcgccagttctggcgaaccagcgccaaccacgcagaccaaccggtgctctcctgctggcgacttgccccttgtggctgaatcgtcggacggatgagaaagccgagcagcatggatgccacgcccaacgtcaacagcgcgaggatcacccgataatcaaacatagtgaccagtttgcccgtcagcgccgagccaatgacaaacgccaccgagccccacagtcgcactttgccgtaatcaagcgggaactgcttttgccacgtattcgccagtgcatcggtcaacggtaccagtggtgagaaaaagaggttaaagccaatcatcaccagcatcagccacgctacgtgcgcccccgcccagaaggcgacagcaaagagaagtgtcagcagtgccagcacgcgcaaggcggaaatcaggcgggaaggatcgctgacgcggggcgcgatgagcaaactcccgaggaaacgggcaaccagacctgcccccaataacaggccgatggtttctggcgttaaaccaatccctttaagccagacgctccagaaaggtagaaaaatgccgtaactaaaaaagtatgtgaaatagccgagcgccaaccagcgcgtggattgcaaaaccatgagtccctcccgtcaggaggcgttagtctggggttaatcgaatgttggtgcaagttgaaaaataagaatattcgagcctgcttcccgatgtctgtaacgccagttcacaagcactaaaaaactgagatccgcgacgcatgttgcaaaaataatgcgtaattatgccgttacgcttgccaaacgttcctgcacaatggcgatgaaatcgcgtaatgccggcttcatctcccctttcttccacgccatcagtaaagcaatggaaggcacatttccggcaatgggacgaaaaacaacctgtccggtattaaaattattcatataaccgggtatcaaagtgacgcccagccccatgcccaccagattcatggtcaccagaatattcgttgccacctggacgatatttggctggctgttttcttgcgcaaaccacgctttaacgatcggcgcaagcgaaccggaatacaccggatcggtactgacgaaattcacgccatccagttgcgcggcggtgatctctttttcatgtgctaaagggtgatcaaccggtaacacaaccactaatggttcgtcaaaaagctccagataatcaatctccgggctataaacaggatggcgcattaagccgacgtcgagttcaccacggcgaattttttcctcctgttgcgtggtgattaaactcaccagctcaatcaaggtgtctggctgtctgagacgaaacatcggtaatacttttggcagtaaattcacttccgccgatggcacaaagccaatggttaattgtctgtcttcctgaacaattttccgcgcccgtaatttggcattttccgcttgttcgaggattgccagcgcgtcctggagaaaacattctcccgccgccgtcaacgcgactttgcgcttatccctcaccagtaacggaacaccgacacagttttcaagatcgcggatctggctgcttaacgaaggctgtgaggtatgcagtttttccgccgcacgggtaaagttcagtgcctgcgccactgcgacgaaatagcgtaaatgccgtagttccatcaccttccccttgttatcgaaaaaacgtctcagctggtagaaattaactatttcacatattagcaaccaaccagcaacatccttatggcacaaaaatagaaggtcaatacatcttatctttcaggattaaaaaatatgaccacaccctcagatttgaacatttaccaactgattgacacccaaaatggtcgggtcactccgcgtatttataccgacccggatatttaccaactggagcttgagcgtattttcggtcgttgctggctatttctcgcccacgaaagccagatcccaaaacccggtgatttctttaacacctacatgggagaagatgcggttgtcgtagtgcgtcagaaagacggcagcatcaaggcgtttctcaaccaatgccgccaccgggccatgcgtgtgagttatgcagattgcggcaacactcgcgcctttacctgcccgtatcacggctggtcttatggcattaacggcgagttgatcgatgtaccgctggaacctcgcgcctacccacaagggttgtgtaaatcccactggggactaaacgaagttccttgtgtggagagttataaagggctaatttttggcaactgggataccagcgcaccgggcctgcgtgattacctgggtgacattgcctggtatctggatggcatgctggatcgtcgcgaaggcggcaccgaaattgtcggcggcgtacaaaagtgggtgatcaactgtaactggaaattcccggcagagcagttcgccagtgaccagtatcatgctctgttcagccatgcttctgccgttcaggtattaggggcgaaagatgatggcagcgataagcgcctcggtgatggacaaaccgcccgcccggtgtgggaaaccgccaaagatgcgctgcaatttggtcaggacggtcacggtagcggtttcttctttactgaaaaaccggatgctaatgtctgggtcgatggcgcagtttcaagctattaccgcgaaacctatgccgaagcagaacaacgtttaggtgaagttcgcgccctgcgcctggcgggtcataacaatattttccccacgctttcatggctaaacggcactgccacactccgcgtctggcatccgcgcggccctgatcaagttgaagtgtgggcgttctgtattactgacaaagccgcctccgatgaagttaaagccgcttttgaaaacagcgccactcgtgcttttggtcctgctggttttctcgagcaggatgactcggagaactggtgtgaaatccagaaattgcttaaaggccaccgcgcccgcaacagcaaactgtgtctggaaatggggcttggtcaggaaaagcgccgcgacgacggcattcctggcattactaactatatcttttcagaaactgccgctcgtggaatgtaccaacgctgggccgatcttctgagtagcgaaagctggcaggaagtgctcgataaaaccgccgcttaccagcaggaggtgatgaaatgagtgcgcaagtttcactagagttacatcaccgcattagccagtttctctttcacgaagccagcttactggacgactggaaatttcgtgactggctggcgcagctcgacgaagagattcgttacaccatgcgcaccacagttaacgcgcaaacacgcgaccgccgcaaaggcgtccagccaccgacaacctggatttttaatgacaccaaagaccagctggagcggcgaatcgcccgtctggaaacgggcatggcctgggcagaagagccgccgtcacgcacccgtcacttaatcagcaactgccagataagcgaaaccgacatcccaaacgtatttgctgtgcgggtaaattatctgctttatcgggcacaaaaagagcgcgatgaaacattctatgttggaacgcgtttcgacaaagttcgccgtctggaagatgacaactggcgcttgctggaacgggatatcgtcctggatcaagcggtaatcacttcccataacctgagtgtactgttctgatgaatcgaatttatgcgtgtcccgttgcggatgtgccggagggtgaggctctccggatcgatacctcgcccgtcatcgccctgttcaacgttggcggcgagttttatgccattaacgatcgttgcagccatggtaatgcgtcaatgtcagaagggtatctggaagatgacgccacggtggagtgcccgctacacgccgccagtttttgcctgaaaacggggaaagcgttatgcctgcccgccaccgatccgctcaccacttatccagtacacgttgaaggtggtgacattttcatcgacttaccggaggcgcagccatgagcgatctgcataacgagtccatttttattaccggcggcggatcgggattagggctggcgctggtcgagcgatttatcgaagaaggcgcgcaggttgccacgctggaactgtcggcggcaaaagtcgccagtctgcgtcagcgatttggcgaacatattctggcggtggaaggtaacgtgacctgttatgccgattatcaacgcgcggtcgatcagatcctgactcgttccggcaagctggattgttttatcggcaatgcaggcatctgggatcacaatgcctcactggttaatactcccgcagagacgctcgaaaccggcttccacgagctgtttaacgtcaatgttctcggttacctgctgggcgcaaaagcctgcgctccggcgttaatcgccagtgaaggcagcatgattttcacactgtcaaatgccgcctggtatcctggcggcggtggcccgctgtacaccgccagtaaacatgccgcaaccggacttattcgccaactggcttatgaactggcaccgaaagtgcgggtgaatggcgtcggcccgtgtggtatggccagcgacctgcgcggcccacaggcgctcgggcaaagtgaaacctcgataatgcagtctctgacgccggagaaaattgccgccattttaccgctgcaatttttcccgcaaccggcggattttacggggccgtatgtgatgttgacatcgcggcgcaataatcgcgcattaagcggtgtgatgatcaacgctgatgcgggtttagcgattcgcggcattcgccacgtagcggctgggctggatctttaaggaagcacgatgaaagaaaaaacgatcattattgtcggtggcgggcaagcggcggcaatggctgcggcctcgctacgccagcaagggttcaccggtgagctgcatctgttttccgatgagcgacatcttccttatgaacgacctccactctcgaaatccatgttgctggaagattccccgcagttacagcaggtgttacccgctaactggtggcaggaaaacaatgttcatctgcattccggtgtaaccatcaaaacgctgggtcgcgacacacgagagttagtgttaaccaacggcgaaagctggcactgggatcagctttttatagcaaccggcgcggcagctcgaccgctgccgttgcttgatgcactgggagaacgctgctttaccctacgccatgccggtgatgccgccagactgcgagaagttctgcagcccgaacggtcagtcgtgattatcggtgccggaactattggtctggaactggctgccagcgccacgcagcgcagatgtaaggtgacagtgattgaactggcggcaaccgtcatgggccgtaatgcaccaccgcccgtgcaacgctatcttttacagcgccaccagcaggctggtgtgcgcattctgctcaataatgccattgaacatgtggtcgatggtgaaaaagtagaactgacgctgcaaagtggggaaacgcttcaggctgatgtggtgatttacggtattggtatcagcgccaacgagcaactggctcgcgaggccaaccttgatactgccaatggcattgtcattgatgaggcttgccgcacctgcgatcccgcgatctttgccggtggcgatgtggcaatcactcgtcttgataatggtgcactacaccgctgcgaaagctgggaaaacgccaataaccaggcgcaaattgccgctgccgcaatgttagggctaccgctaccgctactgccgccgccgtggttctggagcgatcagtacagtgataacttacagtttattggcgatatgcgtggcgatgactggctttgtcgtggcaacccggaaactcagaaggcgatttggtttaatctgcaaaacggcgtgcttatcggtgcggtcacgctgaatcaggggcgtgagattcgcccaattcgcaaatggatccagagcggcaaaacgtttgatgcgaaactgctgatagatgagaacatcgcgcttaaatcactgtaaccaggataattagcgaatatctcaatgcctggggcgtggcgaggtgcaagagtgtgtattacgtttaaatcacattatcttgcaaagggattggttatgaacacactacgttattttgattttggagctgcccgccccgttttgttattaattgcccgtatcgccgtggtcttaattttcattatttttggttttcccaaaatgatgggctttgacggtacggtccaatatatggcctcgttgggcgcgccaatgccgatgctggcagcgattattgcggtagttatggaagtgcccgccgcgatattaatcgtgcttggctttttcacccgtccgctggcggtgctgtttattttctacacgctgggtacggcggtgattggtcaccattactgggatatgaccggcgatgcggttgggccaaatatgattaatttctggaagaatgtcagtatcgctggcgcgttcttgctattggcaattaccgggccgggggcaatttctctcgatcggcgttaggaaagatgccggatgcggcgtgaacgccttatccggcatttaataaattacagccactctacccgcaacgacatctctgaagttgttgattcccctggtgctagcgcaatgagatcacccccttccgggcgatgatgatcatccggcgcatggctcatcggttccagacagaagaaatcaaacgcatatcctttatcaaacgcagggtcggaaacaaagatgaaataacacggtgcaggtggcgtcgtttccatgatgatggcataaccttcctgcggctgctcgatgcgggcctgaccattccatccggcaaaaccattgttcacccactggcgcggcaacggcgcgggctggttaaaatccagttcctgcggtagctgctcgcaaaactcacccgccagccactgctcccgctccagccagtaaccgctcgcctgtgcctgaatccgcgtttgcggcgacaacggaaaataaggatgccagccggtaccaaatggcagcgtctctgccccttgattggtgacagagagcgtcaccgtcagcgtatccgccgttaaatgaaacgcctgacttacccgatagtgatagacaccgctgcgatgttcatacaccagacacaaactatcatcgctgtgcgagacacattgccactcgcccagccagccatcgccgtgtagatagtgcgcatcccactcaacattcggttgcagttgatactcacgcccctgccagacaaaacgattgccgctcacccggtttgcaaatggcaccagcggaaaacatgaggcatcggttgccacaccgctttttttaccaggacgtaagagcggcgtcgtatcgcgccagaagccttcgattacgccgccctggtcagaaacgtccagctttagcgacccgtgggataaggtatagatggtcatccgctaactccttaatccgggaagttaatcacaactttcccgcatttgccgctcgccatcagcgcataggcatcacctgcctgttccagcgagaagcgatgggtaatggcgttacgcggccacagcttccagtccgtcagatcatgggcgcatttttccatatggaacagactggtcacccaggagccgataatccgccgttgatggtgcatcagatcggcgctgacctcgaattccacttttccggtttcaccaatgtaaaccacccgtccccagtcagcggtggattgcagtgccagcaagcgacctgcggcattaccggaacaatcgagcgcaacatccgcgccaccgtgggtgagttcggcgataatctgcggcagaccttcggtggttgctaaatagccgtgatccatcacccctaactgttttgccatcgccagacgttccggcagcatatcaacgccgatgatccgttttgcaccgcgacctttcgccagcatcatcgccatcatgccgactggccccagaccgaccaccagcacgttatcactgccggaaacttcgccgcgcaaaattccttcatacgctgtaccaacgccgcaactgataaacgcaccatcttcgtagctcagcgcatccggcaggaggatcagatctttttcttccgccagcaagtattcggcatgaccgccgtcacgctgccagccgtaagccgcttttccttcgccagtacaagaaataggaaaaccgcgacggcagttcgggcaaaaaccacagccagaaatgtgatacaccagcacgcggtcgccctctttaaaatggcggcagccttgccccatcgccacaatctgcccgcacggttcatgaccgttgataaagccctggtataacggtttatcgggtgccgccgctgtggcacggtgttgatgatagatatagtggacatcgcttccgcaaatcccggaggatttcattttgatcagtacctggttaatccccggcgtcggcaccgcaacttcccgcagatcgacggtcgaatttcctggtaaataagctgccagcatcgttttcataaatccctcattaacaatacgattaattttcatccctgccgcacccgcgccaggggcgttaaggtttagcgtttcgctttactgcttcgctgggtcagcaagatattcgccagcaccgccaccacgatgatgacgccgcgtaccacctgctggaaaaaggagttaataccgagcagcaccagaccgttaccgattagcgtaatcaccagcacaccaagcaatgtaccgaacagggaaccgcgaccgccggaaagtgccgtaccgccgaccacgaccgcggcgatgacgtcaaactccagaccgtttgcggcacctgcgttaccagaaccgaggcgcgccgccaacaaaatgccggtcaccgccgctaataatcccgaaagggtaaagataagaatgcgcacccgacgaacgttgatgccgcacaactgcgccgccgtagcattaccgccaacggcaaaaaccgagcgcccgaaggcggttttgcggctgatgaacacaaacagcgcaaacaacacaatcatgatcagcgcggataccggcacaccgagaaattgtccgcccagccagtccagcacctcgttttcatcaatcggcactggcagtgcgttcgtcataaacagccccattccgcgcagggcgctccacagccccagtgtggcaacgaaacttggtacattaaacacgccgcgcagcaccccggccagcgttcccatcagcgcgcctaacagcaacaccagcaggcacgccaccgccagcggaacttcaaattgcagcaaaaatgccaggcacaccgagacaaaagccaccatcggcccaacgctgacatcaatttcaccggagataataatcagcgtcatcgcccaggcggcaatcccaatggtggcggcatcgcgcagcacgttcatctggttattcaatgagataaagccaggcgcgttcagggagaagaccagataaagaatggcaatcaccaccagcaaaccgatctcattaatatggcgactgacaaattgtttgagcgagacgctcttgccctgcggcaatggtaatgacgaagcagacatcttcaggttcctcggtaaaattcatcagtgcacagacagaatggcggacatcagctcatccacattgaccggagcgtgaaactcctgcgagaacgtgccgtgctgtaataacaggatgcggtcacacaccagcggcaactcctccacttcactggagataaacaccacgctttttccttcggcagccagctcacggacaatacggtaaatctgctgtttggcttcgatatcgacgccgcgcgttggctcgtcgagcaacaaaatctggctggcagcatagacccaacgaccgatcaccactttttgctgattgccaccagaaagcgtgccgatgggtgtttcgctactggcggccttgaccgtcatccgctgcatcacctcttcggtcaggcggcggatggtggaccattgcagcacaccgttggcgctgattttttgccgattggtcagcactgtattttcgtcaacgcccaaccagggaatgatccccgcttctttgcggttttctggcgtatagccaatgccgcgtttcagcatgtcgccgtaatcggggcgcgtgattttctcgccgttgataacaatttcgccctgttcatactcctccagcccaacaatcgccttcagcaattcactgcgccctgcccccagcagaccagcaatgccgagcacttcgccacgacgtagcgtaaaactgatatcctccagcttgggcttatggcgtaacgcacggacttccagcacggcctgatccacaatttcctgaggggctaccggcgcaatatcaacgtgatcgcgcccgagcatcagcgacacaatatgatgcgtggaggtgttttcgagcatcacatcgcccgccacctgaccatcgcgcataacggtggcacaggaggcaatgcggcgaatttcttccatccggtggctgacataaatcaccgccacgcccagtgccgacatctttttcaccgcgctgatcaccagttcaacttccgcactcgcaagcgaactggtaggttcatcaagaatgaccacgcgcggctcgcccttcatcacccgcgcaatttccaccagctgcttttgcgccgggcttagcgttgaaacaagttgttcaggactaacgtcaacgcccagcgcctgtaagcaacgttgggcatcctgcgccatttgcaggtaatcaatcatgccgttgcggcggggccactgaccgaggcagaggttttccgccactgtcagcccttccaccagacttaactcctgataaaccgcgcgcacccccagttcagcggcacggcgagtcagcgtagcttcgtcaccttccagtcgcgtctcgccaatccagatatcaccgctatccgggcgttcgctgccggtaagcattcgaatgagagtcgatttgcccgcgccgtttttacctaacagcgcacgaacttcgcctttattgagcgtgaagttaacgttatccagcgcaacgacgccgggataacgcttatttcctgccaccacttttgctaccgggactgcctctgttgccgtgaacatagggacctctgcgaatcagcgattagggcagaccatcaacgtgcgttgccagccactgtttaccgtcttccgttttggtatagagatcgataggcacctgaatcactttttcaccgtcggcttgtttattgataaccttcaatgtttgcgcgaaaacagcattgcccattttcttaccggaaatatccactaccgctttcagcacctgattgttttccagctcctgagcaatttcggttgtcatatccgaaccgaaaacagcaatttttccggcctgattttgattacgtaccgcttttaccgcgccgagtgtcgcaccgcccgattcccccataatggcgttgagatccggcgtggagataattagtttttcaccaacggaaatcgctttatctaaaacagtcccttcctgattagcgacaatttgcgcgccgggaacgcgggattttaaaacttcttcaaatcctttacgtcgctgcacacaaacttcaaaggcttcgcaattgatgacggcaattttcggctggtcaattttattggcaataaaataatcagcggcagcgttacccagttttttaccaaattccagcggatcgccgaccagatacgccgagacatatttatcgacccccttttgattaatacaggtgttgtagcaaatcaccggaatgcccgcttcactggcgcgacgaacggtacggctactgccattttcagacactgccgataaaataatggcatcgacattacgcgccacgagggtatcaacaaaggtactttctttcgaaatatcaccctgggcgttagtttctattaactgaacttgtactgaggaatcttttgccgcatcctgaacgccctgacgcactccagcgtagtatccctgagtatcaaggtatattgcgccaatggtcatttctttttccgcagccctggcaaatagtgcgctacctaatagcgtagccattaataatagattacgggttgttctcatttttgtaggcatagagcctcctgtagggtttttattaacaacggcttattctaattattttgtgatgagcggcagcgcgtgccgctcaaatattacagttaatagggtttagtgaacgcggttaaaaataaaaggcatcacggtggtgaataatgccgctttcggccaagccggattaatcgccgtcaattcagcgcgagcagactcatattgcgcaacctccccgagtcccgcggacgccagcatcgccaccatcaggcatttttctttatgctgctgttgtaaatcgccatacagcgacaacaagtcaggttgcgagacggcaaagaaatccgcttcgatactggttttcgccatctcttgcgcccactgtttcatttcactaaacagttgctgtgcggtttgttgttcgcccagcagtcgcagcgccatcccttgccagaagagataatcaaccggctgatcgttgtaataactgtgaatgttaatagtgcgatcgccggtcgccgccagacgtaaacaacgcgtcgcttcagtttcatcgccctgcgcgttggcgcatatcgcctgccagaaccagatgtcgttatcagtttgccccggtaaacggccttcgcttaaattctccggataatgcagcgcggcatgaagcagttcgcaggcctgctgcggctgtctggcatcaagatgctgccaggcgcgtaataactggttgaggataaactgactggtgaccttcccttccccgccttcccacgggtggaatttgcgcgtggcgagaatgtccgccgctttgtctgcctgacccgtgagatgccacaaattgagcagttctgcggtcatgtcgtcgcgtttcagcgcaatttccagattattttccagacgcgccagtcgtttctccggtgtggctccacttaacttatccagcaaatcccgttcgaaaagcagacgtgcatcctgcggcgcaagctgataagcattatcaagataacgcgcggccagctcataatcgtgttgcttattccacgcatggatcgctaacccgcgccagccgtcggcaaactccggcgacatctctacgcaacgttgccaaaaggcaatggctttgttgtagctacgtttgttgtagtagaagcaagctagtaaatggcgagcaaaccagcactcttcaatactctccagcgccgccacttcttccagcgtattcgggaaacggacaaactgcgggaagacatcaatggcttttgcgaccagttcgccacgttcggctttcggcagcaagctggcttgcaggtaaagcggcagcgtgcgctggcagtccagtgcgttcagcatctctgccgccagggtgggcattccccagttaatcagttgcccggcggtcatcagggcgttaacgtcgcgtccctgacacagaccgcgccactgcgcgagagctgattcgctacgaccatcgaaccagttcagccaccacagagtggcgttcagcggataatcgcgcagcagtttctcgcgctgcacacgcgcgttgtcctgacgaccacttaacaccagcagcagattatgcaggcaaagcacttcctgattggttgggcaggcgcgaagactttgttggcaaaaatccagaccagcgtcgaagttaccattacgcgccgccagtcgtgccaggccataatagccaccggctttgctgttgccgctccagaccgcacgccagaaatcctcttcggcttgttgatattgtccctgacgttcgtaagcactggcgcgaatcaaactcgcctgtccgcactgcggatttttgttcagcgcatgtgcgcgtttcagagcctgagtggcatacgccaccgcttgcgggaaatctgcgcggttatattccagcatcgccagcgccaggttacagcgataatccagcgggtccagcgccacgccgcgcaggtagtaatcgaacggtgaacggctggcgtgatgatattgctccagatgctgaccgataaaccaggcttcatctgtactggtaatgtcttgtgctgccagtggcgctttggcgacgtccggtaacggcaacgcttgcggctgatgttcctgataactcagtacaatattgccgtcggcatcggagagctcaatggtcagcctttcaggattgataccgtgcaacacgccctggatggcggtcgcaggcatcagtgccacggcatcatcaagtaacgcgttgcatttaccgatttcgcggatcgccaggcggtatccgttcaacggagagatggcatacagcccccactcaatcccccgcttactacgctggagttttatcaccgcatcgcgggaggcattttgcaccatgcccaaagaatgataaggcaggaaatactgctcaaaacgcttctcttcgtaagcatcaagccaggtaaaatcgggctggttatcggcaaaaataccggtcatcagttcgatatacgggccgttattgtcggtcagactcttatcccacgcctggccaaattcactgtgtccccaactccactgttttttacctggcgcaatatggtggttggcaacgtgcagcaaaccgccatcttcatcgtgacaccacgcgccgacaaaatcgtactgcgatttttcggccatatatgaggttggaacaggcacatttttatagcgagaaatgtccactccagcggagtagtccactttgtagtaagtgccggtagcgatggggaaagcggagacggcccgtttgccgtgatcaaacaccgccgttacatccggcgggaagacgctctgatgcccttccccccctttcactgccgggttggcccaccacaagaaatgacgcggcgtggcgttcccgttatagacgcggctggcgatttccagcgccgcccggtcagggcgcagggtgaaacctgtcatcacctgtaaaccatgcatcggctccgtttcgcctacccacaccgtctgtgcaccgtcttcatgggcttcgagggtgaaatcaacgggcataaaggtggtcgggcgatgatgttgcggccagttaaactcaatcccaccggaaatccacggccccagcagccccaccagcgcaggtttaatgacttcattgtgataaacaaaatcgcgctgtttcactttatcccacgcgcgatgcacccgaccgcccagttccggcaggatcatcactttgatgtagtcgttttccagccacaccgcctgccaggatttcagggttttctgctcgctcagcgtatcggtcacgccgtagggataaaccgcgccggacgatccctgataaacgcgattttccaggaacatgggatgtatatcctgcggcccggtttcataggtcgggatctcaacgcgctcttgccacacttttactggagtcatggtgccctcaatattaacaagacatactgaattaaaagatttgtggcagtgtattgaacaatctggcaatgttttcgcggaataatcacgcaattaactaaacaaggtttagtgaagatgagagcctgcattaataatcaacagattcgccaccataacaaatgcgtgattctggaactgctgtaccggcaaaagcgcgccaataaatcaacgctggcccggctggcgcaaatttcgattccggcagtcagtaatattttgcaggaactggaaagcgaaaaacgggtggtgaatattgacgatgaaagccagacgcgcgggcatagtagcggtacatggctgattgcgccggaaggtgactggacgctgtgcctgaacgtgacgcccaccagtattgagtgtcaggttgctaatgcttgtttaagtccgaaaggtgaatttgagtatttacagattgatgcaccgacgccgcaggcgctgctgtccgaaatcgaaaaatgctggcatcgccaccgtaaattgtggccggaccataccatcaacctggcgttggcaatccacggtcaggttgatcctgtgaccggcgtgtcgcaaaccatgccgcaagcgccgtggacaacgccggtggaggtgaaatatctgctggaagagaagctcggcattcgggtgatggtcgataatgactgcgtgatgctggcgctggcggagaaatggcaaaataattcgcaggaacgggatttctgcgtgatcaacgttgattacggcattggctcgtcgttcgtgattaacgagcaaatttatcgcggcagtttgtatggtagcggacagattggtcacaccatcgttaatccggatggcgtcgtctgcgactgtggacgttatggctgcctggaaactgtcgcctcgttaagcgcattaaaaaaacaggcgcgggtatggctaaaatcacaaccggttagtactcaacttgatcctgaaaaactgactacagcgcagttaatcgctgcctggcaaagtggagaaccgtggatcaccagctgggttgatcgctctgccaatgccattggtttgagtctgtataacttcctcaacatcctcaatattaatcagatttggttgtacggtcgcagttgtgcctttggtgagaactggcttaatactattattcgccagacaggatttaacccgttcgaccgcgacgaaggaccgagcgtgaaagcgacgcaaattggctttgggcaattaagccgcgcacaacaggtgctgggaattggctatttgtatgttgaggcgcagttacgacagatttgatggcgcgataacgtagaaaggcttcccgaaggaagccttgatgatcataaacgaaaaattgcctgatgcgctacgcttatcaggcctacacggagattgcaatatattgaatttgcaaagttttgtaggccggataaggcgttcacgccgcatccggcatgaacaacgagcacattgacagcaaatcaccgtttcgcttatgcgtaaaccgggtaacgtgcgcagatgtcgagaactttacctttgatgcgctcgataacggcttcatcattgatgctgtccagcacgtcacacatccagccagccagttctttcgcttcggcttctttaaagccgcgacgggtaatcgccggagtacctacacgaataccggaggtcacaaacgggctcttcggatcgttcggtacgctgtttttgttgacggtgatgttagcacggcccagagcggcgtctgcttctttaccggtcaggtttttatcaaccagatcaaccaggaacaggtggttatcagtgccgccggaaaccactttgtagccgcgctcgaggaacacttctaccatcgctttagcgtttttagcgacctgctgctggtaagttttgaactcaggctccatcgcttctttcagagcaaccgctttaccggcgattacgtgcatcaacggaccgccctgaccaccagggaaaacggcagagttcagttttttgtacagctcttcgctaccacctttcgccaggatcaggccgccgcgcggacccgccagggttttgtgagtggtggtagtaacaacgtgagcatgaggaaccgggttcgggtagacgccagcagcaaccaggcccgcaacgtgcgccatatcaacgaacaggtaagcaccgatgctgtcagcgatttcacgcattttcgcccagtccaccacgccggaatatgcagagaaaccaccgataatcattttcggcttgtgttctttggcttgtttttccagatcggcgtagtcgatatgaccggtagcatcgataccgtaaggaacgatgttgtacagtttaccggagaagttaaccggagaaccgtgagtcaggtgaccgccatgcgccaggttcatacccagaacggtatcacctggttccagcagcgcggtgtagaccgcaaagttagcctgggagccggagtgcggctggacgttagcgtagtcagcgccgaacagttctttcgcacgatcgatcgccagttgttcaacgatatcaacatactcgcaaccgccgtagtagcgtttgcccggataaccttcagcatatttgttggtcagctgagaaccctgcgcctgcattacgcgcgggctggtgtagttttcggaggcgatcagttcgatgtgctcttcctgacgtactttttcctgctccatagcctgccacagttcggcatcataatcggcaatgttcatttcacgctttaacatccgcatctcctgactcagctaacaataaaatttttggcctttataggcggtcctgttggacaacggcgaacagtataaccgaatcattgtgcgataacaggtcttgacaaaggaatttacgcaaacgattaccttcaggctacgcaaggctttggagaataaagagcttgcaaccggaaacggatttcttttcaggtttgtgatgcaaatttttcacttcatcacattctttctgaaaaacaccaaagaaccatttacattgcagggctattttttataagatgcatttgagatacatcaattaagatgcaaaaaaaggaagaccatatgcttgacgctcaaaccatcgctacagtaaaagccaccatccctttactggtggaaacggggccaaagttaaccgcccatttctacgaccgtatgtttactcataacccagaactcaaagaaatttttaacatgagtaaccagcgtaatggcgatcaacgtgaagccctgtttaacgctattgccgcctacgccagtaatattgaaaacctgcctgcgctgctgccagcggtagaaaaaatcgcgcagaagcacaccagcttccagatcaaaccggaacagtacaacatcgtcggtgaacacctgttggcaacgctggacgaaatgttcagcccggggcaggaagtgctggacgcgtggggtaaagcctatggtgtactggctaatgtatttatcaatcgcgaggcggaaatctataacgaaaacgccagcaaagccggtggttgggaaggtactcgcgatttccgcattgtggctaaaacaccgcgcagcgcgcttatcaccagcttcgaactggagccggtcgacggtggcgcagtggcagaataccgtccggggcaatatctcggcgtctggctgaagccggaaggtttcccacatcaggaaattcgtcagtactctttgactcgcaaaccggatggcaaaggctatcgtattgcggtgaaacgcgaagagggtgggcaggtatccaactggttgcacaatcacgccaatgttggcgatgtcgtgaaactggtcgctccggcaggtgatttctttatggctgtcgcagatgacacaccagtgacgttaatctctgccggtgttggtcaaacgccaatgctggcaatgctcgacacgctggcaaaagcaggccacacagcacaagtgaactggttccatgcggcagaaaatggcgatgttcacgcctttgccgatgaagttaaggaactggggcagtcactgccgcgctttaccgcgcacacctggtatcgtcagccgagcgaagccgatcgcgctaaaggtcagtttgatagcgaaggtctgatggatttgagcaaactggaaggtgcgttcagcgatccgacaatgcagttctatctctgcggcccggttggcttcatgcagtttaccgcgaaacagttagtggatctgggcgtgaagcaggaaaacattcattacgaatgctttggcccgcataaggtgctgtaatttgatgttgccggatggaaacatccggcaacccttgacgcggtttaaattgccgcgtcgtcctcttcaccggtacggatgcgaatgacccgtgccacgtcaaagacgaagattttaccgtcaccgattttgccggtttgcgccgtgcgaataatggtatcgacacaggtatcgacaatgtcgtccggtacgacaatctcaattttcactttcggcagaaaatccaccatatactccgcgccgcggtacagctcggtatggcctttctggcgaccaaagcctttcacttcggtcaccgtcatgccggtaataccgacttcggccagtgcttcgcggacatcgtccagcttgaagggttttataatcgcatcaatctttttcatgctattccttgaaaaggtcgcctgtcttttgatctgctaaacgtaacacataacgccaattcattccttgaaatcgtttgcatccagctcgtgtcgggaaagcagtttataaaattctgtccggttgcgccccgccattctcgccgcgtgggtgacgttgcctttggtgatttgcagcagcttacgcaaatagttgagttcaaactgattacgtgcctcaacaaaggttggcagcgccgtattttcaccctccagcgcctgctccaccagcgcatcactaatcaccggagatgaggtcagcgccacgcactgttcaatcacgttgaccaactggcgcacattacccggccagctcgcggtcatcaggcgtttcatcgcatcggtagagaacgcgcggacaaacggtttatgtcgctctgccgcctggcgcaacaggtgatttgccagtagcggaatgtcttctgtgcgctccgccagtgccggaattttcaggctgacaacgttgaggcggtaatagagatcttcgcggaattccccgcgcgccatcgcttttggcagatcacggtgagtggcagaaataatccgcacattgatatcaatatcgcggttactgcccagcgggcgcactttacgctcctgcaacacgcgcagcagtttgacctgtaacggcgcaggcatatcgccaatttcatcgagaaatagcgttccgccttccgccgcctggaataaaccttcgcgattgctgacagcgccagtaaacgcgccacgcgcatgaccaaacagctccgactccagcaattgctcgggcaatgcgccacagttaatagcaataaatggtttgctgttgcgcgggctggcgttgtggatagcctgggcgaaaatctctttcccggtgccgctctgaccgttaatcaaaacgctgacgtctgattgcgccaccagccgcgcctgttccagcaaacgcagcatcagcgggctgcgggtgacaattgcctcgcgccagcgttcatcggtggctggcgcggattgctccagcgcatcgtcaattgcctgatatagcgcgtctttgtcgacaggcttggtgaggaaactaaaaacgccctgctgtgttgcagcaacggcatcgggaatagaaccatgcgcggtaagaataattaccggcattcccggctgcactttctggatttcagcaaacagctgcataccgtccatttcatccatccgcaggtcgctgatgactaaatctactttttcgcgattcagtacccgtaatccttcagcgccactttccgccgtgaccacactgtagccttcgctggtcaggcgcaggccaagcagtttcagcaatcccggatcgtcatcgaccaataataaatgcgcaggtttatggctcatcaggagtgacctcatgggtggatggcgcgggcttttcactctcgtgcggcgtatccggcgagaaatttccagccggtttgcgggtcgagagctggcgttcaatatcggtcaggttttccagcttgcgggtggtgagttccagttgctgctgtagaacgtgatgttgctggcgcaatgtatccagctcgctgtcgctggactgctggagtttactgtaacgttggcgctcttccgccagttgcagttgcagcgcctgaccatcgcgccagagttgatacagtgggcgaacctgtgccgggatctcggtacttaacgcttcaatacgcgcgaccagctggcggcgctcatacggcgtaattttggcgtcggcgagcaaaatcccttgtttaaaggtattttgccagctgccgtcgtcatattggcgagcttgctgacgcgactgcgcaggcattaaacgatcagcacaatccatcgcccgcagccagtaaagcggattggtttcggttgatttaccttgcagcgcccagatgtcgctacattcagtagaaagatagtcagccagttgataaaccggaattttttcttctgctggcgtatcaatggctggcttattgtgattctgcacgcaacccagcaatgccagacatggcagccctgccagccacagccgtcggggcaataatcgttgaaaaatgtgtcgcatattcaccagacttaaagcctatcccagtgggcgtaattgttgcagacagtctggacatggacagcgcggagaaaccggagcgtacatatcgtacgtgaagatttcgagcactgcccggggccgaactgacaaataaaatagcctgataggataggctgttagcattatttcgtgtttttcgacgacggtaattcaatgcggaaacaaacgtcttgcccgctctcgtcgaccagatacagttccccttgcatacggcgaatacaatccctggcaatgcttaatcccagaccgctgcccttcaccgccccttttcgctggtggcttccctgaaaaaagggttcgaagatcatggcgcgttcctcttgcggaatgggcgtgcctgtattgatgacatcaatataaacccgcgcaccatgtaaactgctgcgaaggcaaatgttaccggattcagccccgtagtgcaccgcattggagtaaagattatccagtacgctcatcagcagcattggctccgccaggcaagctgttgctttgagatcgacgtcggtatgcatcattttagcccgtgcgggcaggctatgagcagaaaccactgtctccaccagcggtgctaactcaacattctccagttccaccgcactgtccgcctgtttacggttgtaatcaagcagttgttcgatcagtttttgcaaattgcggctgctgctatcaagaatgctcaccacctctttttgctctggcgtaagcggcccgacaacctggtcagccagtaattcagtgccctcgcgcatactcgccagtggcgtttttaattcatgagataaatgtcttaaaaattgatggcgttgggattccagccatgacaggcgctcacttaaccaaagaatacgttgcccaaccgagcgtaactcgctcggtccactgaacgagacgctattgcccagagaacgcccttcccccagacggttgatcatgcgctcgatatttttcaccggcccgataatcatccgcgtgaaaagcagtaccattaccagactcaccagaaatagcaccagcgattgccaaccaaaatattgcccacgttcggcgatttcacgctgaagctgctgcccacgagagaacaccactgtgcgcgtggcctgtaccatttcggtattggcactggcaaaggcttcaagacgtgcggcggcggcagcatcgggaccgctgttgttacactgaagttgagccagattgtgcaaatcctgacgtaatgcctggtagagtttatcgtccggcagcacgcctgcgtgggcatcgagcatttcgctgtaacgcttgcgctggctttgataaaccttcgccagggttgggtcgtccagcacgcaatactgacggtaactacgctccatctccagcgccgcgttggtcatcgcttcactgcgccgggcatcaataagcgtagtgcggttaaccagcgccgcctgatcgctaagcgcattcaggctttgccaggcttgccatgccagcaccaacaggggcagcagaatcagcaaaaatgccagcattaccagttgtcgtaatgagcggggaaaaacgggccagcgtttcaaggtgttactctcgtcagacgcgaatagcctgatgctaaccgaggggaagttcagatacaacaaagccgggaattacccggctttgttatggaataaggcggtgcctaactcgacgtttcgcccgatggttgatatagctacgctgatatcagaagttggacggcaggcaccttgttgtgcgtcattcgtattttatgtagcacgtcccgaaggggctgacataagtcggtgaatgagccactggttactattatgcagtaactgtgccaataaagaaaatagtttggtaacgtactgattatacgttgctttgaggggtttatgtctcctccgctgtttgaatgtaaatcagccactgtgtcgctaaaaagagacaacttaagataaacttattagataatattaaaatcaatgagttaagtgtcgccagaaagcgacacggcaaaccacccattgtcgtgatttacagacacaaaaaagctcccggagttgggagcttatgatagtggttggtgcttaatgccgcatccgggctgcaaaaccaatgggctgacgacttaccccaactgcttacgcgcattgcggaaaatgcgcatccatgggccatcctcgccccagttttccggatgccaggagttgctgacagtacggaaaacacgttccgggtgcggcatcataatggtgactcgaccactttcagtcgtgactgccgtaataccgttcggtgaaccgttcgggttagccgggtaggtttcagtgactttgccgaagttatcgacatagcgcagtgccaccagccctttgctttccagtgccgccagatgcgccgcatcacgcacttccacgcgcccttcaccatgagagacagcaatcggcatttgcgagcccaccatcccctgcaacagcagagacgggctttgggttacttcaaccaggctgaaacgcgcttcaaagcgatcggaggtattgcgcacaaaacgtggccacaactcactacctgggatcagttcacgcagattagacatcatctggcaaccgttacatacccccagcgccagcgtttgcggacggtggaagaaggttgcaaactcatcgcgtacacggtcattgaacaggattgacttcgcccaaccttcaccggcacccagcacatcaccgtaggagaaaccaccgcacgcgaccagggcgtggaaatcttccaggcccgtgcgtccggtcagcaggtcactcatatgcacgtcgatagcatcaaagcctgcacggtggaaagctgccgccatttcaacatgcgagttcacgccctgctcacgcagtacggcaactttcggacgtgcgccagtggcaatatacggtgctgccacatcttcgttgatatcgaacgacagttttacattcaggcccggatcggcgtcgttagatttcgcctgatgctcctgatcggcacactccgggttgtcacgcaggcgctgcatctgccaggtagtttctgcccaccagacacgcaacgtggtgcggctttcgctgaatacagtctgcccgttggcggtaatcacaaaacggtcaccggaaaccgcctgccctacataatggacacaatcagcaagcccatgctgtgccagtacggactcgaccgcttcacggtcagcggcacgaacctgaatcaccgcacccagttcttcgttaaacaacgccgccaggcgatcgtcacccagagtggcgatatccgcgtcaatgccacaatgaccagcaaaggccatttccgccagcgttaccagcaggccgccatcagagcggtcgtgatacgccagcagcttacgctgtgcaaccagcgcctgaatcgcgtcatagaagcctttcagttgcgcgacatcgcgtacatctgccggtttgtcgccaagctgacgataaacctgcgccagcgccgttgcgcccagcgcgttattgcctttgcccaaatcaatcagcagcagtgcgttatcttcggtagaaagctgcggcgtgatggtgtgacgtacatcttccacgcgggcaaatgcagaaatcaccagcgacagcggcgacgtcatttcgcgctcttcgttaccttcctgccagcgggttttcatcgacatggagtctttacccaccgggatcgtcaggcccagcgccggacaaagctcttcgcccacggctttaacggcttcatacaggcccgcatcttcaccagggtggcctgccgccgccatccagttggcggaaagtttgatgcgtttgatatcgccaatttgtgttgcggcgatgttggttaacgcttcaccgaccgccagacgggcagaggcggcgaaatccagcagcgcaaccggcgcacgctcgccaatcgccatcgcttcaccgtagtagctgtcgaggctggcggtagtgaccgcgcagttagcgaccggcacctgccacggccccaccatctgatcgcgcgctaccatgccggttacgctgcggtcgccaatggtcaccaggaaggttttttccgccacagtcggcagatgcagcacacgtttcaccgcgtctgcaatggtgatcccttcacgggccagcgcgtcgcctttcgctttcagcgtttgtacatcgcgggtcatcttcggcgttttaccaagcaggacgtccagcggcagatcgatcggctgattatcaaaatgacgatcgtgcagagaaagatgcagttcttcggtcgcttcaccaatcaccgcgtagggtgcgcgctcacgcttacacagttcgtcaaacagcggtaattgatcggcagcaaccgccagcacgtagcgttcctgggattcgttacaccagatttccagcgggctcatgcccggttcgtcgcttagaatctcgcgcagttcaaatttaccgccgcgcccgccgtcgctcaccagttccggcatggcgttagaaagaccgccagcgccaacgtcgtggataaacaggattgggttggcatcaccaagctgccagcaacggtcgatcacttcctggcagcgacgctccatctccgggttgtcgcgctgtacggaagcaaagtcgaggtcggcatcagactgaccagacgccatagaagacgctgcaccaccgccaagaccgatgttcattgccgggccgccgagaacgaccagcttcgcaccgacgttgatctcgcctttttgtacgtgatcggcgcgaatgttgccgatcccgcccgccagcatgatcggtttgtgataaccgcgcagctcttcgccgttgtggctgttcactttttcttcataagtacggaagtagccgttcagtgccggacgaccaaattcgttgttaaacgccgcgccgcccagcgggccttcggtcatgatgtccagcgcggtgacaatgcgctcaggcttaccgaaatcttcttcccacggctgttcgaagccaggaattcgcaggttggaaacggagaaaccaaccagacccgctttcggctttgcgccgcgcccggtggcaccttcatcgcggatttcaccgccggaaccggtcgccgcgcccggccacggagaaatcgccgtcgggtggttgtgagtttcgactttcatcagaatatgcgccggttcctgatggaaatcgtagcggcccgtttcgtggtcagcaaagtagcggcccacttcagaaccttccattacggcggcgttatctttataagcagagagaacgtgatctggcgtggtttcgaaagtatttttgatcatcttgaacagcgatttcggctgctgttcaccatcgataacccagtcggcgttaaaaattttgtggcggcagtgctcggagttcgcctgggcaaacatatacagttcgatgtcgttcgggttacgaccaagctttgtgaaagcatcctgcagatagtcaatttcatcttccgccagagccaagccaagacgcaggttagcgtcgatcagcgcctgacggccctgccccagcaaatcaacgctggtaaccggagtcggttgatggtgggcaaacaactgctctgcatcatctaaagcaaaaaagaccgtttccatcatgcggtcgtgcagttcagcggtaacctgctgccattgttcattggtcagcgtaccggcttctatatagtaagcaacgccgcgctcaaggcggtttacctgttgtagcccgcagttatgggcaatatcggtcgctttcgaagaccagggagagatggtgccaggacgcggggtcaccagcaggagtttgccttgcggggcgtggctggcgagtgccgggccatatttcagcaggcgttcaagttgtgcgtgctcatcatcgtttaacggcgcattgaggtcagcaaaatggacatactcggcgtaaatattgtgaaccgggagcctggcagcctgaaaacgtgccagcagtttgttgattcggaatgccgacagtgcaggcgaaccacgcagaatttccatcataagtctctcgtcttctaagctttcggtgtacccaagggggggaaacgggcgtcattataaagaatctgatgcgctgacgaaaccgtttgcgtggaaataaaatcaccatcgtgaattagcaacgcgtgccgccaatggctgtaataagttgccatctggcgcaggtttacgcaaaatgccgctcatttatgagtaaacctttcactattattacgttttttcaagctgggacgcgcacgacacagagaattaactaattgaaaaaattaaagattaattatctgttcatcggcattctggcactgctgctcgcggtcgctctctggccatccattccctggtttggtaaagccgacaaccgtatcgccgccattcaagcgcggggagagttgcgtgtgagcaccattcatactcccctgacttataacgaaatcaacgggaaaccttttggcctggattacgaactggcgaaacagtttgccgattacctcggcgtaaaactgaaagtgaccgtgcggcagaatatcagccagctgtttgacgaccttgataatggtaacgccgacctgctggcggcaggacttgtctataacagtgagcgggtaaaaaattatcagcctggccctacctattattccgtgtcacaacaactggtttataaagtgggtcagtatcgcccacgtacgctgggcaacctgacggcggagcaactcaccgttgcaccgggtcatgtggtggttaacgatctccagaccctgaaagaaacaaaattcccggaattaagctggaaggtagacgacaaaaaaggctctgcggaattaatggaagatgtcatcgaaggaaaactcgattacaccattgctgattctgtcgccatcagcctgtttcagcgcgttcacccggagctcgccgtagcgctcgatatcaccgatgaacaaccggtgacttggtttagcccgttagatggcgataataccctttccgccgccctgctcgacttcttcaacgaaatgaatgaagacggtacgctggcacgcattgaagagaaatacctggggcatggcgatgattttgattacgtcgatacgcgcacatttttacgcgccgtcgatgcggtactgccgcagttaaagcccctgtttgagaaatacgccgaagaaattgactggcgtttgctggccgctattgcttatcaggaatcgcactgggatgcacaggccacttcaccgacgggtgtgcgcggcatgatgatgttaaccaaaaataccgcgcaaagcctcggcattacggatcgtaccgatgccgaacagagcatcagcggtggcgtgcgttatttgcaggatatgatgagtaaagtgccggaaagtgtgccggagaacgagcggatctggtttgccctcgctgcgtacaatatgggctatgcgcatatgctggatgcccgcgccctgacggcaaaaaccaaagggaatcctgacagttgggctgacgtaaaacagcgtctgcctttacttagccagaaaccctattacagcaagctgacttacggctacgctcgtggacatgaagcctacgcttatgtcgaaaatattcgtaagtatcagattagcctggtgggttatctgcaagagaaagagaagcaggctacagaagcggcgatgcaactggcgcaggattatccggcggtatcgcctacggagttgggcaaagagaaatttccttttctctcgtttctttcccagtcgtcatcaaactatttgacccattctccctctctgctgttttccaggaaagggagtgaagagaaacaaaattaatccgtcgaggattgcgcttttttctgcgctttaatttcctggcggcgcatgcgaaagaagtcactgagcaacgccgcgcactcatccgccagtattccttccgtaatttccactcggtgattcatacccggatgatgcagcacatccattaaagatcccgcagcgccagttttcgcgtcacgcgcaccaaagaccacgcgaccaatgcgactgtggatcatcgctccggcacacattacacatggttcaagcgtgacatacaacgtggcgtcgatcagacgataattttgcatcaccagaccaccctgccgcagggccatgatttctgcatgtgcggtgggatcatggcgaccaatcgggcggttccagccttcgccgattacccgattgttatgcactaataccgcgccgaccggcacttcccgctcatcccaggcacgtttcgccagcgtcagcgcgtgacgcatccagtattcgtggctaaattcgacttcagacaaaaagaaaactccggttataaaagcgcggcgcattatacacggacgctatgctttactctattccagttgctggagttcaccgcgcggggttactcgccaacgatgctgacagaaataaagcagcggattgtcctgattactgtcgctatagccactgtacagccgcagcggagtgccgattttgcgctccagttgtgcgaccttttcatgtcccagacaacgcatcgtcaatacccaaccaccatagccacgctgaatttggctggcgataagattaacccgcggcagccagggcgtatcgaaataaaccgcttcaaccagcggctgcggagagccggtaatcaaccagatatcagcatcggaacttaacaggtaggtggttaatcgctcctgaaccagcggaaaggcggtaacattgtcgcgaaaccagcgcacgaaatcggcctgcaacgtctgtaaacgtgcttcgctgtgaccaaaagtgcacccccacagaagcagactcatcggccagcgtgccgcacgaccttttatcaataacgcaatggctataatcggtaacaacggcaggacaagtaacgcattcagcggttggcgacgtagtaaatagcgcagaaaactgccgaacatatcctgctgatgcaatgttccatctaagtcaaaaaacaccacacgacgctcgtgagttgccaaaccatactcctctggactgaaacatcctgattaattttcgctactacatagcctaacagatagatcatcacttttccggcaacaatcgaccgcatcatggctaactggaatttttaattcatggcaattagcggcaatggaatataaaattcactcgcgtgtgtctcatattgcctgttgtcgccactatttcatcgcgaggaaagatatgaacggcttacttcgtatccgtcagcgttaccaggggcttgcccagagtgataaaaaactggcggattatctgctgctacaacctgatacggcgcgccatttaagctctcagcaactggccaacgaagccggagtcagtcagtccagcgtcgtgaagttcgcgcaaaaactcggctataaaggttttccggcgcttaagttggcgttgagtgaagcgctggcaagccagccggaatcaccctccgtgcccattcataaccaaatccgcggtgatgatccgttacggctggtcggcgaaaaactgattaaagaaaatactgccgctatgtacgcaacgctaaacgttaatagtgaagagaaactgcatgaatgcgtaacaatgttgcgctctgcgcggcggataattctgaccggtattggcgcttcgggtctggtggcgcaaaactttgcctggaagctgatgaagattggcttcaatgctgccgcagtgcgcgatatgcatgcgctactcgcaacagtacaggcgtcgtcccctgacgatctgttattagccatttcctacaccggtgtacgacgcgagttaaacctggcggcagatgagatgctgcgagtgggcggaaaagtgctggcgattaccggctttactccgaatgccctgcaacagcgtgcttctcattgcctgtataccattgccgaagaacaagcgacaaacagtgcttcaatctctgcttgtcacgctcagggaatgttaacggatttgctgttcattgcgctgattcagcaggatctggaactggcaccagaacgtattcgtcatagtgaagcgctggtgaaaaaactggtctgagtaaagaatgcgcgtataatgcccgcccggtttgtgttgttttgagagtttccttatggcgttgttaatcactaaaaaatgcatcaattgtgatatgtgtgaacccgaatgcccgaatgaggcgatttcaatgggagatcatatctacgagattaacagcgataagtgtaccgaatgcgtagggcactacgagacaccaacctgccagaaggtgtgcccgatccccaatactattgtgaaagatccggcgcatgtcgagacagaagaacagttgtgggataaatttgtgctgatgcaccacgcggataaaatttaatattctactctggaagtagagtattaattatattactgggaagccttaacgccattatatttatttaattgatgacattagcataatcattcactaagttaatttatatagtatctgcccagacacttatttatagttattaaaggtgcgtccgactggttcaccggacgcaccttaagtacgtttccttgtgttataagaacagaaggatcagctgtaaaacagcaatgatgattttgatgacccgtttaatcaggtatcggcaatcagtcattcgtttttccttaaacaaggaatgcagccattcagattagcccttacatctccccaaaactgaacgtgcgagttattgagggtgcatgctgcactccacaccagagctttgacgacaccactcgtttcaatgggggaattctgtggcatggtgtaaagcacagcaaaatcttcaataacgaagccaattttaatgtacttacgaattggcggtcacgttaatctttccatcaatattgctttcttcgtaaaggctcgagtttttatgctaaagattgcaagttgcttgtaaaagataagtacactgatccataatcgctgttgttgagggtgcatgctgcacaaaattaaagttaaaaagtaaaacccccgttccttaccagttcgggggttttactttttaaagagaacggtattatttttaactttcaataattaccgtggcacaagcatagtgccgctcatctgccagcgttacatgcatatttgcaacgcccagcttttccgccagttttaatgcctcgccccatagccgtagccgtggtttgccgagctcatcattgaatacttcaaattgattaaacgccagaccattgcggatcccggtgccaaacgcttttgctgcggcttctttcacagcaaaacgcttcgccagaaaacgcaccggctggtggtgcgttttccagatagcccattcgttatcgcttaatacgcggcgtgccaggcgatcaccggatcgggcgatcaccgcttcgatgcgagcgatctccacaatatccgtgcctaaacctaatattgccattagccacgcgcttccagcatcagacgcttcatttctgccaccgcatctttcagtccggtcatcactgcacgaccaataatggcatgaccgatattcagttcatgcatctcagggatggcggcaatggctttcacgttgtgataggtcagaccgtgtccggcgttaactttcagaccgaggcttgcggcaaaggtcgcggctttggcgatacgcgccagctcttgcgcctgttcggcgtcagttttggcatcagcatagcaaccggtgtggatctcgataaacggtgcgccaacctctgccgcagctttgatctgctcttcatcggcgtcaataaacagagaaacctgaatcccggcatctgccagacgtttgcaggcatcgcgcattttgtcacgctgccctgcgacatccaggccgccttcggttgttacttcctgacgcttttccggtaccaggcagcaaaaatgtggcttcgtctcaacggcgatcgccagcatctcttcggtcaccgccatctccagattcatgcgggtatccagcgtctgacgcaggatgcgcacgtcgcggtcagtaatgtgacggcgatcttcacgtaaatgcacggtaatgccgtccgctcccgcctgctcggcaataaacgcggcctgcaccggatccgggtaagcggtaccgcgcgcgttgcgcagcgtagcgatatggtcaatgttgacgcctaacagtaattcagccatgacaatcctcatcattcataatgtgttttcaccgttcgcttaggcataaactgccggaacagttccctgctctttaaaggtttaccgccaagatacggcttaagcgccatgcgggtaaagcgtttcgcggcgcgcagtgtgtctgcgtcaggaaattcccgtgcgtttaacgcttttaactgccttccggtgaacgttttattgtcgataacgacgcttgcgataaaccctttttcttcgcgataacgatacgtcatggtgtcatctaccggctcgccgctacccgcacaatgggtaaaattgacgccataacccagatgcccgagcagtgccagttcaaagcggcgcagcgcgggttctggcgtaccagtgacccctgcaagagactgaatgcagtgcaagtaatcgaaaaaaagttcagagaagcgcgtctcgtattccagtacgcgggagagaagttcgttgatgtacagaccgctgtaaagcgtgataccgcttaatggcagcgccagcgagacggcttcagcactgcgcagcgttttgacttcgccacgcccgccaaaacgtagcaagagaggggtgaaaggctgtaatgcacctttcagggtagagcgtttagagcgtgcgcctttggcaaccagacgcacgcgccccgattcctccgtgaagacgtccagcatcaggctggtttcgctccacgggcgactatgcaggacaaatgcgcgctgccagccttccatcggagttactcttaaagatcgtcaacgtaaccgagactgcgcagtgcgcgttcgtcgtcggcccaaccggatttcacttttacccacagttcaaggtgaacaggcgcttcgaacatttcctgcatgtctttacgcgcttcaatcccgatggttttgatcttggcccctttgttgccaatgaccatcttcttctgcccttcacgctcaacgagaatcaaaccgttgatgtcataaccaccgcgttcgttagagacgaaacgttcgatctccacggtcacggagtacggcagttcagcgccgaggaaacgcatcagtttttcgcggatgatttcagacgccataaaacgctgtgagcgatcggtgatgtaatcttccgggaagtgatgagtcgcttcaggtagatgcttacgcacgattgccgcaatagtgtcaacattcagcccggtttcggcagagattggcacgatatcgaggaagttcatctggcttgccaggaactgcaggtgcggcagcagatcggctttctcctgcacgttgtccactttgttcaccgcgaggattaccggcgctttgccttcgcgcagtttgttgagcaccatttcgtcgtccggcgtccagcgggtgccttcaacgacaaaaatcaccagctcaacatcgccaatagagctgctcgccgctttgttcatcaggcggttaatggcgcgtttttcttccatatgcaggcccggtgtatcgacgtagatcgcctgatacgcgccttcagtatggatccccacaatgcggtgacgagttgtctgcgccttgcgggaagtgatggagattttctgccccagcagtttgttcaacaatgtggatttgccaacgttcggacgtccgacgatggcaataaatccgcagtaacttttatcgatgctcattccagctccagttttttcaacgcctgttcggcggcagcctgctcagccttacgacggcttgaacctgtgccaaccaccggttcactcaggccgctgacctggcagtggatagtaaattcctgatcgtgcgcttcgccacgtacctggactaccagataagtcggcagcggcagatggcgaccctgcaaatattcttgcaagcgcgttttcggatctttttgtttatcgcctgggctaatttcgtccaaacgagtttgataccagttgaggattaatttctcgacggtttgaatatcactgtcgaggaatacgccaccaattaatgcttcgacggtgtcggcgagaattgactcacgacgaaatccaccgcttttaagttcacctggccctaaacgtaagcactcgcctaactcaaattcgcgcgccagttccgccagcgtattgccacggaccagcgtggcgcgcatccggctcatatcgccttcatccacacgagggaaacggtgataaagcgcattggcgataacgtagctcagaatagagtcgcctaaaaattctaaacgctcgttatgtttactgctggcactacgatgagttaatgcctgctgcaacagttcctgatgattaaaagtgtagcccagcttccgttgaagccgattaattacgatggggttcatgcgataccaataaataaatgcgtcaacaattcagcacacgaaacagacctgatatacatggttctgctaactgcttcgctgcagtttcagtttaccggtatatggggaccaacgctgtttcgtgtgccgtggcaacctggaggtgccaaccttaaacttcgggggaatattctatacacaacgacgggggatgtcgttagccacgggagatttatctcataaataattcacgttgtcgccataacggcgacaacgtgaacgaagatggctattaatggatgccgccaatgcgacttaagcgcagaccagtcggccattcgccttcttgcttatcgaagctcatccagatagccgttgcccgaccgaccagattcgcttccggcacaaagccccagtaacggctgtccgcgctgttgtcgcggttgtcgcccatcatgaagtattgtcccggaggaacaatccaggttgccagttgttgccctggctgctggtaatacatccccacctgatcctgcgcaatcggcactgtcagaatgcggtgcgtcacatcacccagtgtctctttacgctcggaaagacgaattccattttctttggtttcgtttttcggcacttcaaagaatccgctggtcgcttccccaccattacggcgtgagaaggtctgaacgaaatcgctcggttccacgtttgagtaggtgaccggcagcgcgttttcacacgcctggccggaactgcatcccggttgaatcgtcagctcttttgagaccggatcgtaagtgactttatcgcccggtaaacccaccgcgcgcttgatgtaatcaagctttggatcttccggatatttaaagaccacgatatcgccgcgtttcggatgaccggtttcgatcagcgttttctggtagataggatctttaatgccataagcaaacttctctaccagaataaaatcaccaattaacagagtcggcatcatcgaacctgacgggatctggaacggttcataaataaacgaacgcacaatcaatacgatagccagtaccggaaaaacagaagcaccggtttccagccagccaggcttcggcgcaacctttttcaacgttgctttatccagtgagtccccggcagccgcctgcgccgctgcctgacgttcccgccgtttaggtgcgaaaaagaatttatccacgcaccataaaatgcccgtcaccagtgtggcaatcaccagaatcagggcaaacatattcgccatgccaactcctaagggttatttgttgtctttgccgacgtgcagaatggcgaggaacgcttcctgcggcagctcgacgttaccgatctgcttcatgcgtttcttaccttctttctgcttctgcagcagctttttcttacggctgatatcgccgccataacatttagccagtacgtttttacgcagctgtttcacggtggatcgcgcaatgatgtgcgtaccaatcgctgcctgaatggcgatatcaaactgctggcgtgggatcagatctttcatcttctccaccaactcgcgaccgcggttttgcgaattatcacggtgggtgatcaacgccagcgcatcaacacgttcaccgttgattaatacgtctacacgtaccatgtcggacgcctggaagcgcttgaagttgtaatccagagacgcataaccacgcgaggtagatttcaggcgatcgaagaagtcgagcaccacttccgccatcgggatctcgtacgtcagcgccacctgattaccgtggtaaaccatattggtctgcacgccgcgtttttctacgcacaacgtaataacgttgccgagatatgcctgcggcagcagcatgtgacactctgcaatcggctcgcgcagttcgtagatgttatttaccgcaggcagcttggatgggctgtcgacgtagataacttctcttgacgtggtttcaacttcatacactacggtcggcgcagtggtgatcagatccagatcgtattcacgttccagacgttcctggatgatctccatgtgcagcaggccgaggaagccgcagcggaaaccaaagcccagcgcgctggagctttccggctcatagaacagtgaggcatcgttcaggctgagtttacccagcgcgtcacggaaggcttcatagtcgtcggaacttaccgggaacagaccggcgtatacctgcggtttgactttcttaaagccaggcagcgccttttctgccggattacgcgccagcgttaaggtatcgccgactggagcgccgtggatatctttaatcgcacatacgagccagcctacttcgccacatttcagttcagtgcggtcaacctgtttcggcgtgaagatgcccagacggtcggcgttataggtctgcccggtactcatgactttcactttgtcgcccttacgcagggtgccgtttttaatacggataagtgaaacaacgcccaggtagttgtcgaaccatgagtcgataattagtgcctgcaacgggccttccggatcgccttccggcggcggaatgtcgcgcaccagacgttcgagaacgtcctgcacaccaacgccggttttcgctgaacagcgcaccgcgtcggtggcgtcgatgccgacgatatcttcaatttcttccgccacgcgttcaggatcggctgccggcaggtcaatcttgttcagtaccggcacaacttcgagatccatttccatggcggtgtagcagtttgccagggtttgcgcttctacgccctgcccggcgtcgaccaccagcaatgcaccttcacaggcagccagcgaacgggaaacttcataggagaagtctacgtggcccggggtgtcgataaagttaagctgataggtttcgccgtcagacgctttgtagtccagcgtcacgctttgcgctttgatggtaatgccacgctcacgctcaagatccatggaatcgagaacctgcgcctccatttcacggtcagacaggccaccgcagatctggataatacggtcagacagcgtcgatttaccgtggtcaatgtgagctatgatcgaaaagttacgtatattcttcataaagtatgattattgtgccttaatgcccggttaaccaggcttttagaagtcgctgttctgagcttaacgtctgtattaatagaaacgccgcattctacactacaacattgaggcgaggaaatgttcataccgtatggattgtggtatctggaaacgtcctcgcatttgttatgcaaaatgcaacaaagccagtgaaatcactggctcgcgtcttccgaagatgtttcaaatcgcacaaggccaggcggcaatgccacgcttaagatgatcggttgccattctgcccgggcagcaaacttacgcgagtagccgcgcgcaatcaggaacccgccaataccaccgaggatcgcaccacataatgctgcgacgtcagaagcaaagagtagctgaaatagcgaagcgataaggaataatcccaccagcggcgacatataaaccagtaatgcggagctaagcaggctgccttcggcgatccccaattccactttttgccccggcactaacggctcatcacagggtacgacaatggtatgcgtggtttgcgggccaagtttatttaacacgcggctaccgcaaccggcgcgtgaagcgcagctgctgcatgaagctttaacatcacaactgaccagcgcctgcccgttttgccaggagacgacggtagcccactctttgatcattgcgctgccccgaacttaatattctcggcaatgcgtttcgccgtttgcggcggcagttcaccgacaatggtgatttcggcgttatcacgtacgcttgtactgacggttctgcgtccggtgcgcaacatctgatcggtgctcgatggcgtagcgcggttaacgtttaccgagaagctgaataatccgtcggaatagagacgtgattcgataggcatgttgtccatcgtcggtagcggacgtcgactactggaaacttcgctaaaaccctgtggcaaccaggttggcgtccagctgaatttagctttttcacctacaggaacagaaagcaacggcggcaaatttgccttcgccagcgtctgcatactgctgctgatatcctgattgacgttaaaagcaatcacgcgaaattgttccagcgtttcaccatcgcgatcaaggagatcaacccgcatcggtaatttcgattcggtgtccatccacacgatgtagctgtagcgtgtaccatctcgggcaaccacgcgaatgacttcgcaaagacgatcagcaatacgcgtgcgcccgacggagataaagtcgtagtaaggagaaaggcgtttgaaatcggtatagataagcgatggcagagaatcaacaatgtaatcgccattaagcgtgaacggttcaagtcccggttcaaaatagctgatttcattgccgcgctgtaccacttcccggcgcgggccatccatttgcaacaattgtgcaagaggacggttatcgaggcgtgcatgtcgataacgcagagactcaacaccctgtttattgatgctgatgaatgacagctcgtaattcagtgactgactggccaggttcatctgctgtaataacgccccggacgcgggagtggccgaggcgttagcagagaataacaggctacctgtcactaatgacatggcaaaccaaagttgcttcattactgcgattgcgttcctaaagtttgaattcctggcacctgtacagcggcttgctgggtttgcgcctgctcaaactgaagctgttcagagtggagtcggcgttgcagttcgtaatcctgcaacattgcattaatgcgacgacgctgctcctgtacctgctgctgttgaccattgtttgcggtcgcttcagaaggtactcccaggcttaccgggctggctttacccatcatcggcagtgtattaaataccggcgtttcgggctgctgggacgtttcagattgtccattatagtgctggacgccaacgataactgcaagcgatacgcatgcggctacgcccatttgggtaagctgtgccgcccacggacgtactttctgccagaatggcattttctgccattgatgcggcgcaggctgggcttccgggatcaatgtcgccggttgacgtactggctcttcttcaatggcggccatcacgcgtgaagagatatcgaaatggagcacctcgggagtatcaccccgcattgagtcacggattaagtgatagctttcccaggttttctgcatttctgggttatgagccagttcgttaagcagctcactatccagcgtttcgccatccattaaagcggaaagttgttctttctgcatgcctaatacccttatccagtatcccgctatcgtcaacgcctgataagcggttgaactttgttatcaatagcttccctcgctcggaagatacgtgaacgcaccgtacctaccggacaatccatgatagcggctatctcttcatagctcaggccatccagctcccgcaaggttattgccatgcgtaaatcttccgggagggactcaatagttcggaaaactatctgtctcagttcttctgacaacattaagttctcagggttcgaaatttctttcaacgcgccgccactttcgaagttttcagcttcaatggcatccacatcactggaaggtggacgacgcccctgagcaaccaggtaatttttcgctgtatttacagcaatccgatacagccatgtataaaaagcgctatctccccggaacgaatccagcgcacgataggctttaataaaagcttcttgtaccacatcgggaacatcacccgacggcacatagcgggaaaccagactcgccactttatgctgatagcgcactaccagtaagttaaaggctttctgatctcccttctggacccgttcaaccaggacctggtccgttaactgctcgctcatccgaggtaaagtctccccaaaccaaatttccacgcgctatcgaaacgccactccattagctgcaatttgagcaagcaaagggttagagtgtctcgtttttgtaaagttccgtaacgcatctgtttttgtttgtcatgctgtagacggatcattatctatcattataagtctacagaatctgaacatcgcattatctgtgtagaaatgcccatttaactgcctgaagagtaacccaacggcctttttatttcaccacctaatcctccaccagccagtaacttctctttttctcgccgccctgcgtcagcgtgtttagcaactgtaacaaatattaaaatagcaggtgtttatccgcacaacatgatgctatgctgaccaaaccatgtttagtaaattaaacaaagaaaatgaatactctccctgaacattcatgtgacgtgttgattatcggtagcggcgcagccggactttcactggcgctacgcctggctgaccagcatcaggtcatcgttctaagtaaaggcccggtaacggaaggttcaacattttatgcccagggcggtattgccgccgtgtttgatgaaactgacagcattgactcgcatgtggaagacacattgattgccggggctggtatttgcgatcgccatgcagttgaatttgtcgccagcaatgcacgatcctgtgtgcaatggctaatcgaccagggggtgttgtttgatacccacattcaaccgaatggcgaagaaagttaccatctgacccgtgaaggtggacatagtcaccgtcgtattcttcatgccgccgacgccaccggtagagaagtagaaaccacgctggtgagcaaggcgctgaaccatccgaatattcgcgtgctggagcgcagcaacgcggttgatctgattgtttctgacaaaattggcctgccgggcacgcgacgggttgttggcgcgtgggtatggaaccgtaataaagaaacggtggaaacctgccacgcaaaagcggtggtgctggcaaccggcggtgcgtcgaaggtttatcagtacaccaccaatccggatatttcttctggcgatggcattgctatggcgtggcgcgcaggctgccgggttgccaatctcgaatttaatcagttccaccctaccgcgctatatcacccacaggcacgcaatttcctgttaacagaagcactgcgcggcgaaggcgcttatctcaagcgcccggatggtacgcgttttatgcccgattttgatgagcgcggcgaactggccccgcgcgatattgtcgcccgcgccattgaccatgaaatgaaacgcctcggcgcagattgtatgttccttgatatcagccataagcccgccgattttattcgccagcatttcccgatgatttatgaaaagctgctcgggctggggattgatctcacacaagaaccggtaccgattgtgcctgctgcacattatacctgcggtggtgtaatggttgatgatcatgggcgtacggacgtcgagggcttgtatgccattggcgaggtgagttataccggcttacacggcgctaaccgcatggcctcgaattcattgctggagtgtctggtctatggctggtcggcggcggaagatatcaccagacgtatgccttatgcccacgacatcagtacgttaccgccgtgggatgaaagccgcgttgagaaccctgacgaacgggtagtaattcagcataactggcacgagctacgtctgtttatgtgggattacgttggcattgtgcgcacaacgaagcgcctggaacgcgccctgcggcggataaccatgctccaacaagaaatagacgaatattacgcccatttccgcgtctcaaataatttgctggagctgcgtaatctggtacaggttgccgagttgattgttcgctgtgcaatgatgcgtaaagagagtcgggggttgcatttcacgctggattatccggaactgctcacccattccggtccgtcgatcctttcccccggcaatcattacataaacagataaaaagcctgggtcagcgccgtatacgcttcggaatagttctggtctggcccacgaatgactaagcgatcgctaaagcattctcccgcctgcggggagaatgccagcagcacccgatgcggcagtcgcgcttcgttttccgccacatccgtccgcaaacgtaaatgccagcccatgcttaatgccagctccgtaaaaccattaccaatctgctctggcagcactacgcagaaaaatccctcttcggtaatgcactccgccgcacaggtcagcaacgatgggtgatcaagcgtagtggtatagcgagcctgttcccgttgaggtgtcgagcactctactccctgctgatagtaaggtgggttactgatgattaaatcgaagcgtactgtctgctgtgtgatccactgctgaatatccgccgtatggacgttaatccgctctgcccacggggactggttgatattttcctgcgcctgcgcggcagcttcactttccagttcaactgcatcaatcatcacgctgtcatcggttcgctgcgccagcattaatgccagcaacccgctacccgcgccgatatcaaggcaacgttttaccccagccaccggtgcccatgcgcccaataaaataccatccgttcccactttcatcgcacagcgatcgtgagcaacaaaaaactgtttaaaagtaaatccattacgacgaagcacggatgtagactgtgacatgaaaataaaaccttgcaggaaaaacggcgatagcaccgggtgagaacaatacccgagaagcgatatccatacaaacagatgaagattgcagccgtaacgtctataatcagcgccccacacagaggtagaacatgactgtaacgactttttccgaacttgaactcgacgaaagcctgctggaagccctccaggataaaggtttcactcgcccgaccgccattcaggctgccgccattccgcctgcgctcgatggccgtgatgtactcggttctgcgccgacaggcaccggtaaaacggcggcgtatctgctgccagcgttgcagcacctgctcgatttcccgcgtaagaaatccggtccgccgcgtattttgatcctcaccccaactcgcgagctggcgatgcaggtgtccgatcatgcccgcgaactggcgaaacatacgcatctggatatcgccaccatcaccggcggcgtagcctatatgaaccacgcggaagtgttcagcgaaaatcaggacatcgtggtcgccacgaccggacgtctgctgcaatacataaaagaagagaacttcgattgccgcgcggttgaaacgctgatcctcgacgaagcagaccgtatgctggatatgggcttcgctcaggatatcgaacatattgctggcgaaacgcgctggcgtaaacagaccctgctcttttcggcaacgctggaaggcgatgcgattcaggactttgccgagcgtctgctggaagatccggtggaagtttctgccaatccctccacccgtgagcgcaaaaaaattcatcagtggtattaccgcgccgatgatcttgagcataaaaccgcgttgctggtgcatctgttaaaacagccggaagcgacccgctcaattgtgtttgtgcgtaagcgtgagcgtgtgcatgagctggcaaactggctgcgcgaagcgggcatcaacaactgctatctcgaaggtgagatggtacagggcaagcgtaacgaagcgatcaagcgtttgaccgaaggtcgcgtaaacgtactggtcgcaaccgatgttgccgcgcgcggtatcgacattcctgacgtcagccacgtctttaacttcgatatgccgcgcagtggcgatacttatttgcaccgtatcggacgtaccgcgcgcgccggtcgtaaaggcaccgcaatttcgctggtggaagcccatgaccatctgctgctgggtaaagtaggccgctatattgaagagccaattaaagctcgcgttattgatgagttacgcccgaaaacgcgtgcgccaagcgaaaagcagaccggcaagccatcgaagaaagtactggctaaacgtgctgagaagaaaaaagctaaagagaaagagaagccgcgggtgaaaaaacgccatcgcgacaccaaaaatattggtaagcgccgtaaaccaagcggaacgggcgtgccaccgcaaacgacagaagagtaatctcaatgccaggtttaagcctggtattaaaagtgctggcaaacgcaaaactgcctgatgcgctacgcttatcaggcctacgtggctcatgcaatatattgaatttgcacgatcttgtaggccggataaggcgttcacgccgcatccggcatgaataaagcgcactttgtcgacaagttaaatgccgggtttaatcccgacattatttttatccagccacaaaactctcttcaacacactgaataaaagtgtgcatcgccgggctaaccgcttttccagcatgatgtgcgcacatggccgtaatggtctgcgactgttcgccaaaaggcaattcaattaattctccgcactccaactcttttgccaccgcaaagcgcggtaggtagctgaccccgatattcgccgcgacacaacgcttgatgctttcgatacttataagctcaatggtgttttccaccgtgatccgccgctgacgcagcgtgctctcaaatatctgccggaagacacattgcggttcgttgataataaagctacaggcgttatgtcttcccggctcagtaaaatcgacatctgcaatttgcggtgaagccaccagcaccagtgattgttcacccaactctcgtcgattcagagcatcatcattccctacacgataaaagacgccaacatcggcctcatcattcagtagcgcatcacggatcacgtaacagttcagcgactgcaacgataaacgcacttttggggcgcgttgccgaaaacgctgcaacacctgcggcattcggtaagagagcaacgtttcgcccgaaacaacgcgtagttccccgtccggatctgactcctttttggcagcctcacgaagcgtatccatcactcgggtaagttcataaatgtgcggcagcaacttttttccttcgcgggtaaggcacatccgtcggccaattttctcaaataactggactgaaaactcctgctcaagctgctgaatatgaaaagtcaccgtcgattgtgtacagcacaatttttgcgaagctcgcaaaaaggaaccctcttccaccacggttttaagcgtaataaaacggcgcagatccataaccccaaacctatcgaaaatatcgaatctagaatataaaaacattcatttttttaaatgttccgtgtcgggtactgtctaccaaaacagaggagataacaagtgacaccgacccttttaagtgctttttggacttacaccctgattaccgctatgacgccaggaccgaacaatattctcgcccttagctctgctacgtcgcatggatttcgtcaaagtacccgcgtgctggcagggatgagtctgggatttttgattgtgatgttactgtgtgcgggcatttcattttcactggcagtgattgacccggcagcggtacaccttttgagttgggcgggggcggcatatattgtctggctggcgtggaaaatcgccaccagcccaacaaaggaagacggacttcaggcaaaaccaatcagcttttgggccagctttgctttgcagtttgtgaacgtcaaaatcattttgtacggtgttacggcactgtcgacgtttgttctgccgcaaacacaggcgttaagctgggtagttggcgtcagcgttttgctggcgatgattgggacgtttggcaatgtgtgctgggcgctggcggggcatctgtttcagcgattgtttcgccagtatggtcgccagttaaatatcgtgcttgccctgttgctggtctattgcgcggtacgcattttctattaacgaaaaaaagcggaagaggtcgccctcttccgcttagtaacttgctacttaagccttacaggctttcagtaaaggtacgagcgataacgtcgcgctgctgttccggagtcagagagttaaagcgaactgcataaccggatacacggatggtcagctgcggatatttttccggatgcttaactgcatcttccagagtttcgcgacgcagaacgttaacgttcaggtgttgaccaccttcaacgcgaacttctggtttcacttctactggaacttcacggtattcaatgtcacccagtttgcttactgcaaccacttcatcttctgcataacctgcttttgcaacgatgcaacgcgcttcgcctttttcgctgtccagcagccagaaagagttcagcagatcgtcgttagcggctttagtaatctggatacctgtaatcatgtgatgcctccccggcaaaattatttgatttgttcagcctgtcgcggccaattggtaaaaccattgttgcttgagtgtatatatactcctcaaacacccttgaatctttgatttaaatcaataaaaaccacacatcaagtatggtcgcaaatggattttattgttttacatcaacttatgcgggtgtgaaattttaccaatttacatttttttgcactcgtttaagtctaaaaaatgagcatgattttgttctgtagaaagaagcagttaagctaggcggattgaagattcgcaggagagcgagatggctaacgaattaacctggcatgacgtgctggctgaagagaagcagcaaccctattttcttaatacccttcagaccgtcgccagcgagcggcagtccggcgtcactatctacccaccacaaaaagatgtctttaacgcgttccgctttacagagttgggtgacgttaaagtggtgattctcggccaggatccttatcacggaccgggacaggcgcatggtctggcattttccgttcgtcccggcattgccattcctccgtcattattgaatatgtataaagagctggaaaatactattccgggcttcacccgccctaatcatggttatcttgaaagctgggcgcgtcagggcgttctgctactcaatactgtgttgacggtacgcgcaggtcaggcgcattcccacgccagcctcggctgggaaaccttcaccgataaagtgatcagcctgattaaccagcatcgcgaaggcgtggtgtttttgttgtggggatcgcatgcgcaaaagaaaggggcgattatagataagcaacgccatcatgtactgaaagcaccgcatccgtcgccgctttcggcgcatcgtggattctttggctgcaaccattttgtgctggcaaatcagtggctggaacaacgtggcgagacgccgattgactggatgccagtattaccggcagagagtgagtaaatttgcggggaaatgccggatggcagagttgccacccggctgatttatcaggctttattctgacgccaccattcaccaagcaaaacgccggttgcgacagagatattcagcccggcaacgttgcccgtaccgtcaatcttcacgcgcagatcgttcggatcgcgtgcggcatccggtaacccttcatattcctgacccagcaccagtaccattttcgctggcagactagttttgaacagcggtttaccctgctcgctggaagtggtcactacggtgtaacctgcctgacggaaatcatccagcacgttaacaatgttgtcgccagtaatcggctgaacgtgctctgcgccgccttctgcggtacggatagccgcccccgactccagcagtgccgcatcctgcaccacgacacctttcacgccgaagtgcgcgcagctgcgcatcatgccacccaggttatgcgggttagattcgttttccagtgccagaacgcaatcctgcgcgcctgcctggcttacccactgctgcacggttgtaccgttacgctttttgatcaagaagcaaacgccgccgtgatgttccgtgcctgacgcttttgtcaattccgcttcatccaccacatggtacgctttgcggtttgctgccatccagcgcaaagcttctttaaaacgcggcgttacactctggataaaccaggcgcgaacaatcgcttccggacggctctggaaaagtgcctgacatgcattttcgccgtagacgcgggtttcttccgcacgctgacgacgcaacacttccggatcaataaaacttttaccactgatgccaccgtgatcggccttttccggcgtctcatcacccggcgcgcgggaaaccgtgcgccacggcgaatcttcccacttgcggtcacggggctgactctgtttgtcatcgcgggcggggcgacggccaccgtcagcacgagattttcctggacgcccgccccctttcccggtacgcgggttgtgggtacgtttatcagaatcatcatcactgcggacatacatcactttgaccttgccgcttttacctttcatttcatcgttcatgcttttctccaccagcgctgcgcgaagcgcgcagattacccgaagtccgcgcggttcgccatgatttcgtaccaaagcctgcgactatcatacctattgaataaaacagattgttgtctggaacaatgtccccgataatatgtaacatattagaaacataccggcgtcgttgccgataagtctccttactcatcccgaggttagttatgaataccgtttgtacccattgtcaggccatcaatcgcattcccgacgatcggatcgaagatgcggcaaaatgcggacgctgcggtcacgacttgtttgacggagaggtgattaatgcgaccggtgaaacactcgacaaattgctgaaggatgatctacctgtggtgatcgacttctgggcaccgtggtgcggcccctgccgtaatttcgcaccaatttttgaagatgtcgcgcaagagcgtagcggtaaagtgcgctttgtgaaagtgaataccgaagctgaacgtgaattgagcagtcgctttggaattcgtagtataccgacgatcatgattttcaaaaacggtcaggttgtcgacatgcttaatggcgcagtaccgaaagcgccgttcgatagctggctgaacgaatctctttaatcttaccggggcgcatcttgtgccccgttttctcctctgcgacaatggcgttttttcgacgctctcttatgaccgaaaacgctgttctccagttacgcgccgagcgtattgcgcgcgcaacacgtccttttcttgcccgcggtaatcgcgttcgtcgctgccaacgctgtcttttgccagagaaattatgtctctgttcgacaattaccccagcacaagcaaaaagtcgcttctgtttgctgatgttcgacaccgagccaatgaagcccagtaataccgggcgtctcattgctgatattttgcctgataccgttgcgtttcaatggtcgcgtaccgaaccctcgcaggatttgctggagttggtgcaaaacccggactatcagccaatggtggtctttcccgcttcgtatgctgatgagcaacgggaagtgatcttcacaccacctgccggtaagccaccgctgtttatcatgctcgatggtacctggccggaagctcgcaagatgtttcgtaaaagtccgtatctggataatcttcccgtcatttccgtcgatctttcccggctttctgcctatcgcctgcgtgaagcccaggctgaaggccaatattgtactgccgaggtagccatcgcactgttagatatggccggcgataccggggcggcggcagggttaggcgagcattttacccgctttaaaacacgctatctggcaggaaaaacgcaacatctgggtagcatcacagcagaacagttagaaagcgtttaaaatcattcggtcacttctgcgggagaccggtatgagtcagcgaggactggaagcactactgcgaccaaaatcgatagcggtaattggcgcgtcgatgaaacccaatcgcgcaggttacctgatgatgcgtaacctgctggcgggaggctttaacggaccggtactcccggtgacgccagcctggaaagcggtgttgggtgtgttggcctggccggatattgccagcttgccctttacacccgaccttgcggttttatgtaccaatgccagccgtaatcttgctcttctggaagagctcggcgagaaaggctgtaaaacctgcattattctttccgccccggcatcgcaacacgaagatctccgcgcctgcgccctgcgccataacatgcgcctgcttggaccaaacagtctgggtttactggctccctggcaaggtctgaatgccagcttttcgcctgtgccgattaaacgcggcaagctggcgtttatttcgcaatcggctgccgtctccaacaccatcctcgactgggcgcaacagcgtaagatgggcttttcctactttattgcgctcggcgacagcctggatatcgacgttgatgaattgcttgactatctggcacgcgacagtaaaaccagcgccatcctgctctatctcgaacagttaagcgacgcgcgacgctttgtttcggcggcccgtagtgcctcgcgtaataaaccgattctggtgattaaaagcggacgtagcccggcggcacagcgactgctcaacacgacggcaggaatggacccggcatgggatgcggctattcagcgtgccggtttgttgcgggtacaggacacccacgagctgttttcggcggtggaaacccttagccatatgcgcccgctacgtggcgaccggctgatgattatcagcaacggtgctgcgcctgccgcgctggcgctggatgccttatggtcacgcaatggcaagctggcaacgctaagcgaagaaacctgccagaaactgcgcgatgcactgccagaacatgtggcaatatctaacccgctcgatctacgcgatgacgccagcagtgagcactatattaaaacgctggatattctgctccacagccaggattttgacgcgctgatggttattcattcgcccagcgccgctgctcccgcaacagaaagcgcgcaagtattaattgaagcggtaaagcatcatccccgcagcaaatatgtctctttgctgacgaactggtgcggcgagcactcctcgcaagaggcacgacgtttattcagcgaagccgggctgccgacctaccgtaccccggaaggaaccatcactgcttttatgcatatggtggagtaccggcgtaatcagaagcaactacgcgaaacgccggcgttgcccagcaatctgacttccaataccgcagaagcgcatcttctgttgcaacaggcgattgccgaaggggctacgtcgctcgatacccatgaagttcagcccatcctgcaagcgtatggcatgaacacgctccctacctggattgccagcgatagcaccgaagcggtgcatattgccgaacagattggttatccggtggcgctgaaattgcgttcgccggatattccacataaatcggaagttcagggcgtcatgctttacctgcgtacagccaatgaagtccagcaagcggcgaacgctattttcgatcgcgtaaaaatggcctggccacaggcgcgggtccacggcctgttggtgcaaagtatggctaaccgtgctggcgctcaggagttgcgggttgtggttgagcacgatccggttttcgggccgttgatcatgctgggtgaaggcggtgtggagtggcgtcctgaagatcaagccgtcgtcgcactgccgccgctgaacatgaacctggcccgctatctggttattcaggggatcaaaagtaaaaagattcgtgcgcgcagtgcgctacgcccattggatgttgcaggcttgagccagcttctggtgcaggtttccaacttgattgtcgattgcccggaaattcagcgtctggatattcatcctttgctggcttctggcagtgaatttaccgcgctggatgtcacgctggatatctcgccgtttgaaggcgataacgagagtcggctggcagtgcgcccttatccgcatcagctggaagaatgggtagaattgaaaaacggtgaacgctgcttgttccgcccgattttgccagaagatgagccacaacttcagcaattcatttcgcgagtcaccaaagaagatctttattaccgctactttagcgagatcaacgaatttacccatgaagatttagccaacatgacacagatcgactacgatcgggaaatggcgtttgtagcggtacgacgtattgatcaaacggaagagatcctcggcgtcacgcgtgcgatttccgatcctgataacatcgatgccgaatttgctgtactggttcgctcggatctcaaagggttaggcttaggtcgacgcttaatggaaaagttgattacctatacgcgagatcacggactacaacgtctgaatggtattacgatgccaaacaatcgtggcatggtggcgctagcccgcaagctcgggtttaacgttgatatccagctcgaagaggggatcgttgggcttacgctaaatcttgcccagcgcgaggaatcatgagtaaggtactggaaatgttgaccacttaatcgggactggtgttattattgcccgcttatgtcgtctgcattgcacagaggacccttcaatgaacagagaagaaatgcactgtgatgttgtcaaaatttaagcgtaataaacatcaacaacaccttgcccaactacccaagatttctcaatcagttgatgatgtcgatttcttttacgctcccgccgacttccgggagacgctgctggaaaaaatagccagcgcgaagcagcgcatttgcattgtcgccctgtatctcgaacaggatgacggtggcaaaggcattctgaacgcgttgtatgaggctaaaaggcagcgtccggaactggatgtgcgggtgctggtcgactggcatcgtgcacaacgtggacgcattggcgctgcggcatctaacactaacgctgactggtactgccgcatggcgcaggaaaatccgggcgtagatgttccggtttatggcgttccaatcaatactcgtgaagcccttggtgttctgcactttaaaggctttatcatcgacgatagcgtactttatagcggtgccagcctgaacgatgtttacctgcatcagcacgataaatatcgctacgaccgttatcatctgatccgtaaccgtaagatgtcagacattatgtttgaatgggttacacagaatattatgaatggccgcggcgttaatcgtctggatgatgttaatcggccaaaaagcccggaaatcaagaacgatattcgtctgttccgccaggagctgcgtgatgccgcttatcatttccagggcgatgccgacaacgatcagctttctgtaacgccgctagtggggctggggaaatcgagtctgttgaacaagaccattttccatcttatgccttgtgccgagcagaaactaaccatctgtacgccatacttcaacctgccagcaatccttgtgcgcaatattatccagttgctgcgcgaagggaaaaaggtcgaaattattgttggtgataaaaccgcgaatgacttctacattccggaagatgaacctttcaagataattggcgcattgccttatctctatgagatcaatctgcgtcgtttcctgagccgtttgcagtattacgtcaatactgaccagctagtggttcggttatggaaagatgacgacaacacctatcacctgaaagggatgtgggttgatgataagtggatgttgatcaccggtaataacctgaacccgcgcgcctggcgtctggatctggaaaacgccattttgatccacgatccgcaacttgagctggcgccacagcgagagaaagaactggagctgatccgcgagcataccaccatcgttaagcactatcgcgatctgcaaagtattgccgattatccggtgaaggttcgtaaactcatccgccgtttgcgccgtatccgcatcgaccgattaattagccgcatcctgtaatcacaaccccgtcctgtacggggtttgttttttggaggccacgttttgcgtattctttttgtctgttcgctattgttactttctggatgcagccatatggctaacgatagctggagcgggcaggataaagctcaacactttatcgcctcggcgatgctttccgccgccggaaatgaatattcacagcatcaggggatgagccgggatcgcagtgccatgtttggattgatgttctctgtcagtttgggggcgtcaaaagagctttgggatagccgccccgaagggagcggctggagctggaaggatttggcctgggatgtcgccggtgcaagcaccggctataccgtctggcaactgacccgtcactaaagacgcatccccttccctttgcgatgtagcatcaaagaaaccagaaacgccaccacggccatcaaggtcacataccagaagaaggctgtttccattcctattgatttcagcgacaacgctacgtactccgccgaaccaccaaatatagcattagcgaccgcatatgacagaccaacgcctaatgcgcgaacctgtgccgggaacatctcagccttcagtattccactgattgatgtataaaaactcactatcagcagggcacacatcaccagaccaaaagcggcataaggcgaggaaacgttttgcaatgctgagagaataggaacggtaaaaatggctgccagcgaaccgaaacataacattgaggtacggcgaccaatcttatccgacagcgcgccaatgagtggttgaataagcatgaatacaaacaatgcggcagtcataatgccactcgccacgttggcatgcattcccgcagtatttaccagatacttctgcatataagtagtgaaggtatagaaacaaagggagcccgcagcggtaaaaccgagaaccatgatgaatgcacggcgattgcgccataatcctttcagagatccagcttcttttaaagcgcgcgtttcttgttgcgaagtttcatctaactgacgacgtaaccacaacgccacaacagctaacacagctcctaacgcgaaaggaatacgccatccccactctctgagtgcagcgtcttccatggtgtgttgtaaaaccacgacaaccagtagggctagcagttgtccgccgatcaacgtcacatactgaaatgatgcgtaaaaacctttgcgcccttcaacggcaacttcactcatataggtggcgctggtgccatattctccgccaacagataatccctgaaataaacgagcgagaagcaataatgccggagcccacgtacctatagtttcataacctgggaggcaggcgataaccagcgatccgaaacacatcatacacaccgataacagcatcgattttttgcgaccatgtttatcggctatgcggccaaatagccaaccgcctattgggcgcatcaggaatcccgcagcaaaaacacctgctgtttgtagtagttgagtcgtcgtgttcccggaagggaagaagatgtgggcaaagtagagtgaacagaacgagtagacatagaaatcgaaccactcgaccagattacctgaagaggcccccacaatcgcccaaatgcggcgacgagtatcactacttgtcagtttgctgtctgccgttacagtactttcagccatgccattatgtctcctgccgtaatccgatgcttttgtcggtcgcttttgtttattttttttgtaaaggaaatattatacatttgttgcatatcattatgcaaccttaaccatgaatttagttagcaggaaaatggttattgaggagcttaaggataaatttctggtaaggaggacacgtatggaagtgggcaagttggggaagccgtatccgttgctgaatctggcatatgtgggagtataagacgcgcagcgtcgcatcaggcatttttttctgcgccaatgcaaaaaggccatccgtcaggatggcctttcgcataatttgatgcctggcagttccctactctcgcatggggagaccccacactaccatcggcgctacggcgtttcacttctgagttcggcatggggtcaggtgggaccaccgcgctacggccgccaggcaaattctgttttatcagaccgcttctgcgttctgatttaatctgtatcaggctgaaaatcttctctcatccgccaaaacagcttcggcgttgtaaggttaagcctcacggttcattagtaccggttagctcaacgcatcgctgcgcttacacacccggcctatcaacgtcgtcgtcttcaacgttccttcaggacccttaaagggtcagggagaactcatctcggggcaagtttcgtgcttagatgctttcagcacttatctcttccgcatttagctaccgggcagtgccattggcatgacaacccgaacaccagtgatgcgtccactccggtcctctcgtactaggagcagcccccctcagttctccagcgcccacggcagatagggaccgaactgtctcacgacgttctaaacccagctcgcgtaccactttaaatggcgaacagccatacccttgggacctacttcagccccaggatgtgatgagccgacatcgaggtgccaaacaccgccgtcgatatgaactcttgggcggtatcagcctgttatccccggagtaccttttatccgttgagcgatggcccttccattcagaaccaccggatcactatgacctgctttcgcacctgctcgcgccgtcacgctcgcagtcaagctggcttatgccattgcactaacctcctgatgtccgaccaggattagccaaccttcgtgctcctccgttactctttaggaggagaccgccccagtcaaactacccaccagacactgtccgcaacccggattacgggtcaacgttagaacatcaaacattaaagggtggtatttcaaggtcggctccatgcagactggcgtccacacttcaaagcctcccacctatcctacacatcaaggctcaatgttcagtgtcaagctatagtaaaggttcacggggtctttccgtcttgccgcgggtacactgcatcttcacagcgagttcaatttcactgagtctcgggtggagacagcctggccatcattacgccattcgtgcaggtcggaacttacccgacaaggaatttcgctaccttaggaccgttatagttacggccgccgtttaccggggcttcgatcaagagcttcgcttgcgctaaccccatcaattaaccttccggcaccgggcaggcgtcacaccgtatacgtccactttcgtgtttgcacagtgctgtgtttttaataaacagttgcagccagctggtatcttcgactgatttcagctccatccgcgagggacctcacctacatatcagcgtgccttctcccgaagttacggcaccattttgcctagttccttcacccgagttctctcaagcgccttggtattctctacctgaccacctgtgtcggtttggggtacgatttgatgttacctgatgcttagaggcttttcctggaagcagggcatttgttgcttcagcaccgtagtgcctcgtcatcacgcctcagccttgattttccggatttgcctggaaaaccagcctacacgcttaaaccgggacaaccgtcgcccggccaacatagccttctccgtccccccttcgcagtaacaccaagtacaggaatattaacctgtttcccatcgactacgcctttcggcctcgccttaggggtcgactcaccctgccccgattaacgttggacaggaacccttggtcttccggcgagcgggcttttcacccgctttatcgttacttatgtcagcattcgcacttctgatacctccagcatgcctcacagcacaccttcgcaggcttacagaacgctcccctacccaacaacgcataagcgtcgctgccgcagcttcggtgcatggtttagccccgttacatcttccgcgcaggccgactcgaccagtgagctattacgctttctttaaatgatggctgcttctaagccaacatcctggctgtctgggccttcccacatcgtttcccacttaaccatgactttgggaccttagctggcggtctgggttgtttccctcttcacgacggacgttagcacccgccgtgtgtctcccgtgataacattctccggtattcgcagtttgcatcgggttggtaagtcgggatgacccccttgccgaaacagtgctctacccccggagatgaattcacgaggcgctacctaaatagctttcggggagaaccagctatctcccggtttgattggcctttcacccccagccacaagtcatccgctaatttttcaacattagtcggttcggtcctccagttagtgttacccaaccttcaacctgcccatggctagatcaccgggtttcgggtctataccctgcaacttaacgcccagttaagactcggtttcccttcggctcccctattcggttaaccttgctacagaatataagtcgctgacccattatacaaaaggtacgcagtcacacgcctaagcgtgctcccactgcttgtacgtacacggtttcaggttctttttcactcccctcgccggggttcttttcgcctttccctcacggtactggttcactatcggtcagtcaggagtatttagccttggaggatggtccccccatattcagacaggataccacgtgtcccgccctactcatcgagctcacagcatgtgcatttttgtgtacggggctgtcaccctgtatcgcgcgcctttccagacgcttccactaacacacacactgattcaggctctgggctgctccccgttcgctcgccgctactgggggaatctcggttgatttcttttcctcggggtacttagatgtttcagttcccccggttcgcctcattaacctatggattcagttaatgatagtgtgtcgaaacacactgggtttccccattcggaaatcgccggttataacggttcatatcaccttaccgacgcttatcgcagattagcacgtccttcatcgcctctgactgccagggcatccaccgtgtacgcttagtcgcttaacctcacaacccgaagatgtttcacttcagagttgcgaaaatttgagagactcacgaacaactttcattgttcagtgtttcaattttcagcttgatccagatttttaaagagcaaatatatcaaacaagacttaacagtctgttttgagatattgaggtcggcgactttcactcacaaaccagcaagtggcgtcccctaggggattcgaacccctgttaccgccgtgaaagggcggtgtcctgggcctctagacgaaggggacacgaaaattgcttatcacgcgttgcgtgatattttcgtgtagggtgagctttcattaatagaaagcgaacggccttattctcttcagcctcactcccaacgcgtaaacgccttgctattcacttttcatcagacaatctgtgtgagcactgcaaagtacgcttctttaaggtaaggaggtgatccaaccgcaggttcccctacggttaccttgttacgacttcaccccagtcatgaatcacaaagtggtaagcgccctcccgaaggttaagctacctacttcttttgcaacccactcccatggtgtgacgggcggtgtgtacaaggcccgggaacgtattcaccgtggcattctgatccacgattactagcgattccgacttcatggagtcgagttgcagactccaatccggactacgacgcactttatgaggtccgcttgctctcgcgaggtcgcttctctttgtatgcgccattgtagcacgtgtgtagccctggtcgtaagggccatgatgacttgacgtcatccccaccttcctccagtttatcactggcagtctcctttgagttcccggccggaccgctggcaacaaaggataagggttgcgctcgttgcgggacttaacccaacatttcacaacacgagctgacgacagccatgcagcacctgtctcacggttcccgaaggcacattctcatctctgaaaacttccgtggatgtcaagaccaggtaaggttcttcgcgttgcatcgaattaaaccacatgctccaccgcttgtgcgggcccccgtcaattcatttgagttttaaccttgcggccgtactccccaggcggtcgacttaacgcgttagctccggaagccacgcctcaagggcacaacctccaagtcgacatcgtttacggcgtggactaccagggtatctaatcctgtttgctccccacgctttcgcacctgagcgtcagtcttcgtccagggggccgccttcgccaccggtattcctccagatctctacgcatttcaccgctacacctggaattctacccccctctacgagactcaagcttgccagtatcagatgcagttcccaggttgagcccggggatttcacatctgacttaacaaaccgcctgcgtgcgctttacgcccagtaattccgattaacgcttgcaccctccgtattaccgcggctgctggcacggagttagccggtgcttcttctgcgggtaacgtcaatgagcaaaggtattaactttactcccttcctccccgctgaaagtactttacaacccgaaggccttcttcatacacgcggcatggctgcatcaggcttgcgcccattgtgcaatattccccactgctgcctcccgtaggagtctggaccgtgtctcagttccagtgtggctggtcatcctctcagaccagctagggatcgtcgccttggtgagccgttaccccaccaacaagctaatcccatctgggcacatccgatggcaagaggcccgaaggtccccctctttggtcttgcgacattatgcggtattagctaccgtttccagtagttatccccctccatcaggcagcttcccagacattactcacccgtccgccactcgtcagcgaagcagcaagctgcttcctgttaccgttcgacttgcatgtgttaggcctgccgccagcgttcaatctgagccatgatcaaactcttcaatttaaaagtttgatgctcaaagaattaaacttcgtaatgaattacgtgttcactcttgagacttggtattcatttttcgtcttgcgacgttaagaatccgtatcttcgagtgcccacacagattgtctgataaattgttaaagagcagtgccgcttcgctttttctcagcggcgcggggtgtgcataatacgccttcccgctacagagtcaagcatttctttgcttttctctgttgagattctcaggagaaccccgccgacccggcggcgtgtttgccgttgttccgtgtcagtggtggcgcattatagggagttattccggcctgacaagcgaaaaatataaaaactttatcgttcgctcacttttcaggcaaaacatcttaaatatagtcttttccgtctaacttatagacaaaaacgagccccgaagggctcgttttatcatttactggacggcgacaatccggtcttcattaacttccaggcgaatcactttacccggaaccaattcaccagacagtatttgctgtgccagcgggttttcgatctgctgctgaattgcacgtttcagaggacgtgcaccatagaccggatcgtaaccgttctcgctcagcagtttcagcgcctcgtcagaaatgtggatttcataaccacgttcttccagacgtttgtacagacgtttcaactgaatctgcgcaatcgaggcaatgtgctgttcacccagcggatggaagaccaccacttcatcgatacggttaatgaattccggacggaagttatggcttaccacaccgagcaccagctctttcatgtgcgcataatccagttcaccgaagcgttcctgaatcagatcggaaccgaggttagaggtcataatgacgaccgtattacggaagtcgaccgttctcccttgcccgtcagtcagacgcccatcatccagtacctgcaacagaatgttgaagacatccggatgcgctttttccacttcatccagcaggatgacggaatacggacgacgacgcaccgcttcggtcaggtagccaccttcttcataaccgacatatcccggaggcgcaccaaccaaacgagacaccgagtgtttctccataaactcggacatatcgatacggaccatcgcctcgtcgctatcaaacataaagttcgccagcgccttacaaagctctgttttccccacaccagttgggccgaggaacaggaatgaaccaatcgggcgatttggatccgccagccccgcacggctacgacgaatagcgttagataccgcatcaaccgcttcgttctgaccaattacgcgatggtgcagttcttgctccatacgcagcagtttttcgcgctcgctttccatcatgcgagaaaccggaatccccgtccaacgcgccagcacttcagcaatttcggcgtcggtcactttattacgcaacagacgcatagttttgccttcgagctgcgttgcggcttccagttgcttttccagttccgggattttgccgtattgcagttcagacatccgcgccaggtcccccacacggcgagcctgttcaatagcgattttcgcctgttccagttccgctttaatggtctgcgtaccagaaagcgatgccttctctgctttccactcttcttctaactcggagtactgacgttctttgtcgctcagttcttcgttgagcatatccagacgttttttactggcttcatcagactctttcattaacgcctgttgttccagtttgagctggatgatacgacgatcgagtcggtcgagttcttctggttttgagtcaatctgcatacgaatgctggatgctgcttcatcgatcaggtcgatggctttatccggcagctgacggtcagcaatgtagcgatgagacaacgtcgccgctgcaacaattgccgggtcagtaatttgcacatggtggtgcaattcgtaacgttctttcaggccacgcagaatcgcaatggtatcttcaacagaaggctcggcaacaaacactttctggaaacgacgttccagcgcagcatctttttcaatgtactggcgatattcgtcaagcgtcgtggcacctacgcagtgcaattcaccacgcgccagcgccggtttcagcatgtttccggcgtccattgcgccatcggctttacccgcgccgaccatggtatgtaattcgtcgataaataggatgacgttgccttcctgtttggcaagatcgttaagcacgccttttaaacgttcttcaaactcaccgcgatatttcgccccagccaccagcgcgcccatatccagcgccagtacccggcggcctttcaacccttccggcacttcgccgttgataatacgctgcgccagaccttcaacgatggcagttttaccgacgccgggttcaccaatcagtaccgggttatttttagtacgacgttgcagcacctgaatggtacggcgaatttcttcatcacgaccaatcaccggatcgagtttgccctgttcggctcgttcggtaaggtcgatggtatattttttcaaagcctgacgttggtcttcagcaccttgatcgttcacgctttcacctccacgcatttgttcaatcgcttgagtaatgttggcggtggtcgcccctgctgctttcaggatgtcggccagcgtgccgcgagactcaagtgccgccagaacgaacagttctgacgagataaagttatcaccacgtttttgcgccagcttgtcgcaaagattaagaacgcgcaccagatcctgtgatggctggacatcaccaccagtaccttcaacctgcggtaaacgatttaatgcctgattgatatctgtgcgcaactggccagcatttatgccagcggatgttaataaaggactaaccgaacccccttcctgattcagcagggcgctcattaaatgaagtggttcgataaattggttgtcgtgcccgagtgcaagtgattgggcatcggcaagagcaagctggaatttattagtaagacgatccagacgcataactcctcccataacggatcaaagttgctactggagattaaatgaggtcatccctcaattattcaaggttattgaccagattaatgtgaaaagaaaatcacgcgtaccggatcgtcttgattctttaggttatatcagccaaatgaaacttgccatacgaccggtggtcttgtcgcgacgataagagaagaaagtctcattttccgtatatgtacaacggtcgccgccgaaaatttgctcaacacccacgttcgccagacgctgccgggcaagctgataaatatccgccagatacttatcaccatgctgaatgaaagctgcacttgctttagcgtctactgccataaacgcctcgcgaacctccccccccacttcgaacgcgcgtggaccaattgccggccctaaccaggcgagaatattttccggattatcagcaaaacaggaaaccgtctcttccagcacgcctgcgcacagtccacgccagccagcatgagcggcggcgacttccgttcccgctcgattgcaaaacagcacagggaggcagtcggcagtcatcactgcgcaaaccgtgccgggcgtattgctataagaggcatccgcccgttttgaggcataaggttcgccagtgagcttaagcacatctttgccgtgtacctgctcaagccagaccggtttagaaggcaaattgcccgcagcaaaaagtcgcttgcgattctcctcaacgtgatccgggttatcgccacaatgggcaccgaggttgagtgagtcatacgggggcaagctcacgccgccgatacgagtggagctacaggccgcaacaccttttggctgcggccactgcgggacaatcagcttactcataaccagtccacttcatccttatgttcttcgaaatcggcgcgcatcacctcaatcagctccaccatatcttgtggaataggcgcatgccattccatttcgatgccggagatcgggtgataaagacgcagcatggttgcatgtagcgcctggcggtcaaacttacgcagcgtggagataaatgcttccgaagcaccttttggcggacgcggacggccaccataaaccggatcgcccaccagcggatgagtgatatgggccatatgcacgcggatctggtgcgtacgtccagtttccagacgcaaccgcagacgcgtgtgcacacggaagtgttccatgatgcgatagtgagtcaccgctggtttgcccatcggatgcaccgccatatgggtacgtttggtcgggtggcgactgattggctcgtccaccgtgccacctgcggtcatatgaccaatcgccaccgcttcatactcacgagtaatttcacgccgttgcaaagattcgactaaacgcgtctgagccggaacggtttttgccacaaccatcaggccagtggtgtctttatccagacgatggacgatgcccgcacgcggtacatcggcaatgggtggatagtaatgaagcaacgcattcagtaccgtgccatccgggttacccgcgccaggatgtaccaccaggtcgcgcggtttattaatgataataatgtcttcatcttcatagacgatatccagcgggatatcctgcggttcaaaacgcgcttcttcttcaatctcagcgttgatggcaacctgctcgccacccaatactttttctttcggcttatcacaaactttgccgttaaccagcactcgctggtcgaggatccattcttttattcgcgaacgtgaataatccgggaacatttcggccaaagcctgatctaagcgttgaccgagttggttttcggacaccgttgcagtgagctgtactcgttgtgccatatatactgcttcttcgtttatcgttggggttttacggctttgccgtttaatatagtgtgctattgtagctggtcttaaccgggagcaggaacagagaatctcccgtattacattttgaggaaagtcaaaacgtcatgacgcgcatgaaatatctggtggcagccgccacactaagcctgtttttggcgggttgctcggggtcaaaggaagaagtacctgataatccgccaaatgaaatttacgcgactgcacaacaaaagctgcaggacggtaactggagacaggcaataacgcaactggaagcgttagataatcgctatccgtttggtccgtattcgcagcaggtgcagctggatctcatctacgcctactataaaaacgccgatttgccgttagcacaggctgccatcgatcgttttattcgccttaacccgacccatccgaatatcgattatgtcatgtacatgcgtggcctgaccaatatggcgctggatgacagtgcgctgcaagggttctttggcgtcgatcgtagcgatcgcgatcctcaacatgcacgagctgcgtttagtgacttttccaaactggtgcgcggctatccgaacagtcagtacaccaccgatgccaccaaacgtctggtattcctgaaagatcgtctggcgaaatatgaatactccgtggccgagtactatacagaacgtggcgcatgggttgccgtcgttaaccgcgtagaaggcatgttgcgcgactacccggatacccaggctacgcgtgatgcgctgccgctgatggaaaatgcataccgtcagatgcagatgaatgcgcaagctgaaaaagtagcgaaaatcatcgccgcaaacagcagcaatacataacagaaacctgaaacacaaaacggcagcccttgagctgccgtttttttattctgtcagttgtgaaactgaagcgatttagtcgctatcgatctcatcaaatatggctcgctttgagatattcctcaagtaaaaaaacatctcttcctgcgatttctcacaaaaaagattcgttgacaaaaagtgacaaaattatgagattttcatcacacattttgacatcaggaacggtatgctgaattcaccaagacgggaagacaagaggtaaaatttatgacaatgaacattaccagcaaacaaatggaaattactccggccatccgccaacatgtcgcagaccgtctcgccaaactggaaaaatggcaaacacatctgattaatccacatatcattctgtccaaagagccacaagggtttgttgctgacgccacaatcaatacacctaacggcgttctggttgccagtggtaaacatgaagatatgtacaccgcaattaacgaattgatcaacaagctggaacggcagctcaataaactgcagcacaaaggcgaagcacgtcgtgccgcaacatcggtgaaagacgccaacttcgtcgaagaagttgaagaagagtagtcctttatattgagtgtatcgccaacgcgccttcgggcgcgttttttgttgacagcgtgaaaacagtacgggtactgtactaaagtcacttaaggaaacaaacatgaaacacataccgtttttcttcgcattcttttttaccttcccctgaatgggaggcgtttcgtcgtgtgaaacagaatgcgaagacgaacaataaggcctcccaaatcggggggccttttttattgataacaaaaaggcaacactatgacatcggaaaacccgttactggcgctgcgagagaaaatcagcgcgctggatgaaaaattattagcgttactggcagaacggcgcgaactggccgtcgaggtgggaaaagccaaactgctctcgcatcgcccggtacgtgatattgatcgtgaacgcgatttgctggaaagattaattacgctcggtaaagcgcaccatctggacgcccattacattactcgcctgttccagctcatcattgaagattccgtattaactcagcaggctttgctccaacaacatctcaataaaattaatccgcactcagcacgcatcgcttttctcggccccaaaggttcttattcccatcttgcggcgcgccagtatgctgcccgtcactttgagcaattcattgaaagtggctgcgccaaatttgccgatatttttaatcaggtggaaaccggccaggccgactatgccgtcgtaccgattgaaaataccagctccggtgccataaacgacgtttacgatctgctgcaacataccagcttgtcgattgttggcgagatgacgttaactatcgaccattgtttgttggtctccggcactactgatttatccaccatcaatacggtctacagccatccgcagccattccagcaatgcagcaaattccttaatcgttatccgcactggaagattgaatataccgaaagtacgtctgcggcaatggaaaaggttgcacaggcaaaatcaccgcatgttgctgcgttgggaagcgaagctggcggcactttgtacggtttgcaggtactggagcgtattgaagcaaatcagcgacaaaacttcacccgatttgtggtgttggcgcgtaaagccattaacgtgtctgatcaggttccggcgaaaaccacgttgttaatggcgaccgggcaacaagccggtgcgctggttgaagcgttgctggtactgcgcaaccacaatctgattatgacccgtctggaatcacgcccgattcacggtaatccatgggaagagatgttctatctggatattcaggccaatcttgaatcagcggaaatgcaaaaagcattgaaagagttaggggaaatcacccgttcaatgaaggtattgggctgttacccaagtgagaacgtagtgcctgttgatccaacctgatgaaaaggtgccggatgatgtgaatcatccggcactggattattactggcgattgtcattcgcctgacgcaataacacgcggctttcactctgaaaacgctgtgcgtaatcgccgaaccagtgctccaccttgcggaaactgtcaataaacgcctgcttatcgccctgctccagcaactcaatcgcctcgccgaaacgcttatagtaacgtttgattaacgccagattacgctctgacgacataatgatgtcggcataaagctgcggatcctgagcaaacagtcgcccgaccatcgccagctcaaggcggtaaatcggcgaagagagcgccagaagttgctcaagctgaacattttcttctgccaggtgcagcccgtaagcaaaagtagcaaagtggcgcagtgcctgaataaacgccatattctgatcgtgctcgacggcgctaatacgatgcagccgagcgccccagacctgaatttgctccagaaaccattggtatgcttccggtttacgtccatcacaccagaccacaacttgctttgccaggctaccgctgtccggaccgaacatcgggtgtagccccagcaccggaccatcatgcgccaccagcatggcctgtaatggcccatttttcactgatgccagatcgaccagaatacaatctttcggtaaaggcggtaatttgccaataacttgctcagtaacgtggattggcacactaacaatcaccattccggcatcggcaacaatatcagccgctcgatcccagtcatgttgctccagaatccgcacctgataacccgagagggtcagcatcttctcgaacaggcgtcccatctgaccgccaccgccgacgataaccaccggacgcagtgacggacaaagtgttttaaatcctttgtcgttttcactggagtaagattcacgcatcacccgacgcaaaacatcctcaatcagatctggcggtacacccagagcttccgcctctgcacgacgcgaggccaacatagatgcctcgcgctccggaacataaataggcagtccaaagcggcttttcacctcgcccacttcagcaaccagttccagacgcttcgctaataaattcagcagcgctttatcgacttcatcaatttgatcgcgtaatgcggtcaattcagcaaccataataaacctcttaagccacgcgagccgtcagctgcccgttcagatcctgatgaatttcacgcagcaaggcatcggtcatttcccagctaatgcaggcatcggttacggatacaccgtatttcatttcactgcgcggttgctcggaagactgattgccctcgtggatattactttcgatcatcagaccaataattgagcgattgccatctttgatttgagcaaccacggattctgccaccgcaggctgacggcgataatctttattggaattaccgtggctgcaatctaccatcagagacgggcgcagtcccgcctgttccatctctttttcacattgcgcaacatccgcagggctatagttcggcgctttaccaccgcgcaggatcacatggccgtccggattcccctgagtttgtagcaacgcaacctgccctgcctggttaatgccaacaaaacggtgcggctgggcggcggcgcgcatagcgttaattgctgttgccagactgccgtcggtgccgtttttaaaaccaaccggcatggaaagcccggaggccatttcacggtgagtttgcgattccgttgtacgagcaccaattgctgaccagctaaacagatcgcccaggtattgcgggctattcggatctaacgcttccgtcgccagtggcagtcccatattcaccagctcaagcagcaatttacgcgcgatctgcagcccggcttctacatcaaaagagccatccatatggggatcgttaattaaccctttccagccgacagtggtacggggtttttcaaaatagacgcgcattaccagatagaggctatcgctgacctctgcggcaagggctttaaatcgacgagcatattccagagcagtttccggatcatgaatggaacaaggaccacatactaccagcagacgaggatcgcgcccggcgataatatctgaaatgcttttacgcgagtcagcaatctgggcttcttgttgcaggctcaatggaaaagcggccttcagttgttccggagtcattaaaacctgttcgtcggtaatatgtacgttattcagcgcgtctttttgcatgatggcgatcctgtttatgctcgtttgcgatagttgatcctcagcgaggatgacgtaacgataacacataaagtaaagttttcaatccatatttcgtacatttttatttacacaggcaatttagtcgcgctttcaacccttacctctgtatagataaatttacactccctttgaaaacaatccgctatgctttgaaaaaggagaaagaaatgatgaaaaagtttatcgcccccttgttggctttactggttagcggatgtcagattgatccttatactcacgcgccaaccttgaccagcaccgactggtatgatgtcggtatggaagatgcgatatcgggcagcgccataaaagatgacgatgcatttagcgattcacaggcggatcgcggtctataccttaaaggatatgccgaaggacaaaagaaaacttgccagaccgattttacttatgcccgaggactttccggtaaaagctttcctgccagctgcaacaatgttgaaaatgccagccaactgcatgaagtatggcaaaaaggggctgatgaaaatgccagcacaatacgattaaattaattaaaaccccacaaataaattaaacataagattttactcattgtgttttatttctcacattgatgacggtcgcatgaaaaaatgatattttaatgagcattctgaaaaaatatcgatgcatttcgagcgaagatggtggggatccctgaatgcgtttttctcaccgactgttcttacttctgattctcctgctgacgggagcaccaatactcgctcaggagccttctgacgttgcgaaaaacgtgcgtatgatggtttccggtattgtcagttacacccgctggcctgcgctatcagggccaccaaagttatgtatcttttcatcttcacgttttagtaccgccctacaagagaatgccgcgacatctttgccttatctgcctgtcatcattcacactcaacaagaggcgatgatttcaggctgcaatggtttttattttggcaacgagtcaccgacattccagatggaattaaccgaacaatatccgtcaaaggcgttattattaattgccgaacaaaataccgagtgcattattggtagcgccttttgtctgatcatccacaataatgacgtcagatttgccgtaaacctggatgccttatcgcgtagcggtgtaaaggtcaacccggatgtcttaatgctcgcacggaagaaaaatgatggataacgataattctcttaataagcgccccacgtttaaaagagcattacgcaacatcagtatgaccagcatatttatcactatgatgctgatctggttgctgctttccgtgacctcggtgctgaccctgaaacagtacgcgcaaaaaaacctggcactgacagcagcaacaatgacttacagtctggaagcagctgtcgtttttgccgatggccctgcagcaactgaaacactggcagcgctgggccagcaagggcaattttcaactgcagaagtacgtgataagcagcaaaatattctggcatcctggcattacacccgtaaggatccaggcgatactttcagtaatttcataagccactggctcttccctgcccccatcattcagccgattcgtcacaatggtgaaaccattggcgaagtacgcttaaccgctcgcgacagttcaatcagccattttatctggttttcgctcgccgtactgaccggttgtattctgctggcatcaggcatcgcaattaccctcacccgccatttgcacaatggcctggtagaagcgctgaaaaatatcaccgatgtcgtacatgatgtgcgttccaaccgcaatttttcccgacgagtttcggaagaacgtatcgctgagtttcaccgcttcgctctcgacttcaacagtctgctggatgaaatggaagagtggcagcttcgtttacaggctaaaaatgcgcagcttctacgtaccgcgctacatgacccattaaccgggctggctaaccgcgcagcgtttcgtagcggcatcaacacgttgatgaacaattccgatgcccgaaaaacgtcggcgttactatttcttgatggcgataatttcaaatacatcaatgatacctggggtcatgcgacgggcgatagagtcttgattgaaatcgcaaaacggttagctgaatttggcgggctgcgacataaagcataccgcctgggcggcgatgaattcgctatggtgctctatgatgtacagtcggaatctgaagtgcagcagatatgttcagcactgacacaaatctttaatctcccgtttgatcttcataatggccatcagaccaccatgacattaagcattggttacgcgatgaccattgagcacgcctctgcggaaaaattacaagagcttgccgatcacaatatgtatcaggccaaacaccagcgtgccgaaaagctggtgagataacaaggatatatcgatatgataaagcacctggtagcacccctggttttcacctcactaatactgactggctgccagtcccctcagggaaagtttactcctgagcaagtcgccgctatgcaatcttatggatttactgaatccgccggcgactggtcgctgggcttatcagatgccattctgttcgcaaaaaatgactacaaattgctcccggaaagccagcaacagatccaaaccatggcagctaaattggcctcgacagggctaacacatgcccgtatggatggacacaccgataactatggtgaagacagttacaacgaaggcttatcattgaaacgggcgaatgtcgtggccgatgcatgggctatgggtggacaaattccacgcagcaatctcaccacacagggtttaggaaaaaaatatcccatagccagtaacaagaccgcccagggccgcgccgagaaccgccgcgtcgcagtggtgattactaccccttaaaacaccagcaaacagataaaaaagggccagccaattggccagcccttcttaacaggatgtcgcttaagcgaaatcttagttaagacgctctttgatacgagcagccttaccagtacgctcacgcaggtagtacagtttagctttacgaacagcaccacgacgtttgacagaaatgctgtcaactaccggagagtgagtctggaagacacgctcaacgccttcgccgttggaaattttacgaacagtgaatgcagagtgcagaccgcggttacgaatagcgataaccacgccctcgaatgcctgcagacgttttttggaaccttcaacaacccatactttcacttccacggtatcacccggacggaaggaaggtacgtcctgcttcatctgctcttgttcaagttgcttaataatgttgctcataatttaatctcttatcctgggtaaactgatatctcgggggcttacgccatcccatcatgtttatgttgctgttgtgcgtgttccgttttgaactccgccagcaaccttgcttgctcttcagtcagagccaggttttccagaagttcaggtcttctaagccaggtacggcccagcgactgtttcaaacgccagcgacgtatctcggcatggttgcccgacagtaacactggcggaacttccatcccttctaacacctcaggccgcgtatagtgcgggcaatccagcaatccttcagcaaaggaatcttccgttgccgaggcttcatgtcccagtactcccggaataaaccgggaaacggagtcaatcagcgtcattgctggtaactcaccaccactgagaacgtaatcgccgattgaccattcttcgtcaatttcggtttggatcacgcgctcatctataccttcgtagcgaccgcacaccagaatcaatttttgattcgttgccagttcgctgacgcccgcttgatcaagcttgcgtccctgtggtgacagataaatcacctttgcgccttcacccgccgcggcttttgctgcatgaatggcgtcccgcaagggttgcaccatcattaacatccccggtccgccgccgtaaggacgatcgtccacggtacggtgccggtcatgcgtgaagtcgcgaggactccagctctggatgctcagcaggccatttttaactgcccggccagttaccccgtaatcggtaattgcgcggaacatttcaggaaacaggctaattatgccaatccacatagcgccgtcttttaccgtttatccggtggtttaaaaaccaggatcccaatctacttcgattgaacgagtagtgagatcgactttcttgataacctgcccatcgaggaacggtacgagacgttccttgataccaaacgcatctttcaggtttgccttaatgacgagaacgtcattagatccggtttccatcatatcgacgactttaccgagatcgtagccttcagtggttactacctggcagcccatcaggtctttccagtagtagtccccctcttcaagctgaggcagctgcgatgaatccacgacaatttcacaattcgtcagcaggttcgccgcatcacgatcgtcaacgcctttcagcttgatgatcatgtcctgattgtggtgcttccagctttccagctggacttgctgccactgacccgccttctggataaaccagggctgatagtcaaaaatgctttcggcgtcttcggtggaagaaaacactctgagccacccacgaataccgtaagacgaacccatttttcccaaaacgatgggatcaacaggtgcttgcgcggtgagttgtttgctcatcatgaccaccgtgacagattaagctgctttgtttacttctttgatcagcgcagcaacgcgatcagaaatagttgcgccctggccaacccagtgagcgatgcgatccagatccaggcgagtgccttcttctttttcgctagcgattgggttgaagaaaccaacgcgctcgatgaagcgaccgttgcgtgcattacggctgtcagcgacaacaacctggtagaacggacgctttttagcgccgtgacgtgctaaacgaatagttaccataacatcctcttgtgtgaataaaacaaccggaccccatcgaggaacggagtccggtgtcatattaaaagcccgaaaattttactcatttttgcgggaattgcaatcaacagttgctaactctgctgtaaaaggccgtcggcggtgcagccagtttggtgccggagtgcgcgcagtcaccggagcgtacacgcagtacgtgaggatgacgagcacatcccggtgccaaaatggcaaacaagccaggccgattagcgaccagggaagcctgggggcatcatacccttcatgcttctcatcatcttcgccattccgcccttcttcattttcttcatcatgcgctgcatgtcgtcgaactgtttcagaagacggttaacgtcctgcacctgcataccgcaaccggcagcaatacggcgtttacgcgaacctttgatgatttctggcttagcgcgctctttcatcgtcatcgagttgatgatggcttccatacgcaccagcactttatcgtccatctgtgacttgacgttatccgggatctgccccatgcccggcagcttgcccatcagactagccatgccgcccatatttttcatctggcgcagctgctcaagaaagtcgttgagatcgaagccgtcaccttttttcagcttgctggctaatttctctgcctgcgcgcggtcaactttgctttcgatatcttcgatcagcgacagtacgtcgcccatgccgagaatacgcgacgcgatgcggtccggatggaacggctccagcgcctcagttttctcgccaacaccgaggaacttgatcggtttgccagtgatgtgacgaatagagagcgccgcaccgccgcgggcatcgccgtccactttggtcaacactacgccggtaagcggtaacgcttcattgaatgcttttgccgtattggccgcatcctgaccggtcatggcgtcaaccacaaacagggtttcaaccgggttaatcgacgcatggacttgtttgatctcgtccatcatcgcttcgtcaacgtgcagacgaccagcggtatccaccagcagcacgtcgtagaatttcagtttggcttctttcagcgccgcgttaacgatatctaccggcttctgaccaacatcagaagggaagaaatcaacgcccacctgctctgccagcgtctcaagctgtttgattgccgccgggcgataaacgtcggcagaaaccaccagcactttcttcttgtgcttctcgcgcaggaacttaccgagtttaccaacgctggttgttttaccggcaccttgcaggcccgccatcagtacgaccgcaggcggttgcgcagccaggttcagggtctggttctcttcgcccatcgccgcaaccagttcgttacggactattttgacgaactcctgccccggcgtcaggctcttattaacttcatgaccaaccgctttctcttttacgcgattgataaactcacgcactaccggcagagctacgtccgcctccagcagcgccatgcgcacttcgcgcagcgtatcttttacgttgtcttcagtgaggcgtccacggccactgatattgcgcagcgtgcgcgacaaacgatcggttaaattatcaaacattgtctctcgcctggggtggaaacggttggccgcaatcgcgacacatcatcagtattttgccgcagtataacatgaaggcgtctttgttgttatgcaacggttggagcagcgttcacctgacgctatactgcttctctttcttattgctcaaactgtcgacatcactatgcccgtttttgctctgctcgcgcttgtcgcctactccgtcagtcttgcgctgattgttcccggtctgctgcaaaaaaacggcggctggcggcgcatggctattatttctgcggtcattgcgctggtctgccacgcaatcgctctggaagcccgcatcctgcccgacggtgatagcggacaaaacctcagcctgctgaacgttggttcattggtcagtttgatgatctgtacggtaatgaccattgtggcttctcgcaatcgtggctggctgctgctacccattgtctatgcctttgcgcttatcaacctggcgctggcaaccttcatgcccaatgaatacatcacccatctggaagctacgcctgggatgctggtgcacattggcttatcgctcttttcctatgccacgctaattatcgccgccctgtacgcgctgcaactggcgtggattgattaccaactgaagaacaagaagctggcgtttaaccaggaaatgccgccattgatgagtatcgagcgtaaaatgttccacatcacgcagattggcgtggtgctgctaacgctcacgctttgcactggcctgttctacatgcacaacttatttagcatggaaaatatcgacaaggctgtgctctctatcgtggcgtggtttgtctatattgtgctgctgtggggacattatcatgaaggatggcgtggacgccgcgtcgtctggtttaacgttgcgggcgcggtaattctgacactggcctacttcggcagccgaattgtccagcagttaatcagctaaacccagaaaaggagtttcccctggaacacatttctactactacgttgatcattattctgatcatcatggtggtcatttcagcctatttttccgggtccgaaaccggaatgatgaccctcaaccgctatcgtctgcgacatatggcgaaacagggtaatcgctcggccaaacgcgtcgaaaaattgctgcgtaagccagaccgcctgataagcctggtgttaatcggcaataacctggtcaatattcttgcctccgcgctcggcactattgttgggatgcgtttgtacggcgatgcgggcgtggcaattgcgactggtgtgctgacttttgtcgtactggtatttgctgaggtattgccgaaaaccattgccgcgctgtacccggaaaaagtcgcttatccgagtagttttctgctggctccgctgcaaattttgatgatgccgctggtctggttgctgaatgctatcacccgtatgctgatgcgcatgatgggtatcaaaaccgatatcgtggttagcggctctttgagcaaagaagagttgcgcactatcgtgcacgaatcacgctcacaaatttcccgtcgcaatcaggatatgctgctgtcggtgctcgatctggaaaaaatgaccgttgatgacatcatggtgccgcgcagtgaaattatcggtattgatatcaacgatgactggaaatcgattctgcgccaactctcccactcacctcacgggcgcatcgtgctctaccgtgattcgctggacgacgccatcagtatgctgcgagtacgtgaagcctggcggttgatgtcggagaaaaaagagttcaccaaagaaaccatgctgcgcgccgcggacgagatctattttgtgccggaaggtacgccgctcagcacgcagttggtaaagtttcagcgcaacaaaaagaaagtcggcctggtcgtcaacgagtatggagacattcaggggctggtgacggttgaagatattctggaagagattgtcggcgatttcactacgtcgatgtcgccaacacttgccgaagaggtcacgccgcaaaacgacggttcggtgattatcgatggcaccgccaacgtgcgggaaatcaacaaagcctttaactggcatctaccggaagatgatgcccgcacggttaatggcgtcattcttgaggcactggaagagatccctgtcgcaggcacccgcgtgcgtattggcgagtacgatatcgatattctcgacgtacaggacaatatgattaagcaggtaaaagtttttcctgtgaaaccgctgcgcgagagtgtggcggagtaacgaaaacggcccggcattcgcatgcagggccgtgaattattacgaaagcagaaattaagcttttgctttcgctacagtaaccatcgccgcacgaatcgtacgaccattcagcgtataacccttctgcataatgcccagtacgttacctggcgcaacgtcatcagattccaccattgcgatggcctgatgcacattcgggtccagtgggacgttagtttcggcgatcacttcaacgccaaacttacgcacaacatccagcatcgacttcagcgtcagctcaatgccttcaaccatcgcagacatatccgggttagctttatcagccacttccagcgcacgatccaggctatcaatcaccggcagcaattcgttgatgaatttctccagcgcgaatttgtgggctttttcaatatccagttcagtacgacgacgcaggttttccatttcggcttttacacgcaaaatgccgtcacgttcacgggtctgggcttcagccagctgagcttcgagattcgcaactttttcatcgcgcggatccacctgctcagcagaagcttctggctcaactgcctcaatctcttcgtgctgatccatgataatttcttccggggcttgcccctcaggcgttttctgttctttactactcatgaatttctccgcgtttttttcgcattcatctcgctaacttcgcttattatggggatcagtttcagggtttcaagggaagcactcacattgtcatcaatcttcgcaacaaggacctcggaaaaatgaataatcatttcaagtgtattggcattgtgggacacccacggcaccccactgcactgacaacacatgaaatgctctaccgctggctgtgcacaaaaggttacgaggtcatcgttgagcaacaaatcgctcacgaactgcaactgaagaatgtgaaaactggcacgctcgcggagattgggcaactagctgatctcgcggtagtcgttggtggcgacggtaatatgctgggcgcggcacgcacactcgcccgttacgatattaaagttattggaatcaaccgtggcaacctgggtttcctgactgaccttgaccccgataacgcccagcaacagttagccgatgtgctggaaggccactacatcagcgagaaacgttttttgctggaagcgcaagtctgtcagcaagattgccagaaacgcatcagcaccgcgataaatgaagtggtgcttcatccaggcaaagtggcgcatatgattgagttcgaagtgtatatcgacgagatctttgcgttttctcagcgatctgatggactaattatttcgacgccaacaggctccaccgcctattccctctctgcaggcggtcctattctgaccccctctctggatgcgattaccctggtgcccatgttcccgcatacgttgtcagcacgaccactggtcataaacagcagcagcacgatccgtctgcgtttttcgcatcgccgtaacgacctggaaatcagttgcgacagccagatagcactgccgattcaggaaggtgaagatgtcctgattcgtcgctgtgattaccatctgaatctgattcatccgaaagattacagttatttcaacacattaagcaccaagctcggctggtcaaaaaaattattctaattttacgccagcctctttactgtatataaaaccagtttatactgtacacaataacagtaatggtttttcatacaggaaaacgactatgttggcacaactgaccatcagcaactttgctatcgttcgtgagcttgagattgattttcatagcggcatgaccgtaataactggcgagaccggcgcgggtaaatctattgcaatagatgccctcggtctttgtctcggtggtcgcgctgaagccgacatggtgcgtaccggcgctgctcgcgctgacctgtgcgcccgtttttctctgaaagatacgccagcggctctgcgctggctggaagaaaaccagcttgaagacgggcatgaatgtttgcttcgtcgcgtgatcagcagcgatggtcgctcccgtggtttcatcaacggtacagctgttcctctgtcacaactgcgcgaactgggtcagttgctgattcagatccatggtcagcacgctcatcaattactcaccaaacctgagcaccaaaaattcctgcttgatggctatgccaatgaaacctctctactgcaggaaatgaccgcacgttatcagttgtggcatcaaagctgccgtgacctcgcgcatcatcaacagttaagtcaggaacgcgccgcccgtgcggaactgctgcaataccaattaaaagaacttaacgaatttaatccgcagcccggagagtttgaacaaatcgacgaagagtacaaacgtctggcgaacagcggtcaattgctgaccaccagccagaatgcattggcattaatggccgacggtgaagacgcaaacctgcaaagtcagctttacacggctaaacaactggtgagcgaattgattggcatggacagcaaactgtccggcgtacttgatatgctggaagaagctaccatccagattgctgaagccagcgatgaactgcgccactactgcgatcgtctggatctcgatcccaaccgactatttgaacttgaacagcgcatctcaaaacagatttcgctggcacgtaaacatcacgtcagccctgaggcattgccacagtattaccagtcgctactggaagaacagcagcaactggacgatcaggccgactcacaagaaacgcttgcgctggcggtaacgaaacatcatcagcaggcactggaaatcgcgcgcgcattacaccaacaacgccagcaatatgcagaagaacttgcacagctgatcaccgacagtatgcatgcgctctcaatgccgcatgggcagtttacgatcgatgttaaatttgacgagcatcacctgggcgctgacggtgccgatcgtattgagtttcgggtaaccaccaacccaggtcagccaatgcagcctattgccaaagtcgcatccggtggtgaattgtcccgcatcgcactggcaatccaggtcatcacggcgcgtaaaatggaaaccccggcactgatttttgatgaagtggatgtagggattagcggtccaacagcggcagttgtcggcaaactgctgcgtcaactcggcgaatcaactcaggtgatgtgtgttacccacctgccacaagtcgcgggatgtggtcatcaacactattttgtcagcaaagaaaccgatggtgcgatgacagaaacgcatatgcaatccctgaataaaaaagcgcggttacaagagctggcgcgcctgcttggtggcagtgaagtcacacgtaatacactggcgaatgcgaaagaactgcttgcagcgtaaacttttttcctgcttcacggtcagagtaaacagcaaaacgccgtaagaccggaaagcaaaaggttttaaagtgatgaaaggtctattatcatcggcatattacagatgagccacgtactgctcgggcccgaaaaggaatcaaatcactatgcgctgtaaaacgctgactgctgcagcagcagtactattgatgttgaccgcaggctgttccactctggagcgagtggtttaccgtcctgacatcaaccaggggaactatctgaccgctaacgacgtatccaaaatacgtgttggcatgacgcaacaacaagttgcgtacgcattgggtacaccgctgatgtccgatccatttggtacgaatacctggttctatgtcttccgccagcaaccaggtcatgaaggtgtaactcagcaaacgctgacgctgacctttaacagtagcggtgtgttgaccaatattgataacaaacctgcgctgagtggtaactaataataaagttgctctcaaagacgttaaaaaaggtgctcaatgagcaccttttttctgtctgttatttattcgctgatttttctgctcgttgcctgcgaagctctttcggatcggcaatgagagggcgataaatctccacccgatcgccatcatgcacactatcgcttagttttgccggacggctgtaaatgccgactttgtttttagttaaatcgatatcggtacgcaattccagcaagccactggcgcgaatagcttcttcaaccgtcgcgccctcctgcagcgtcactcgctgcaggtactgcttctcaggtagcgcataagccacctcaacggcaattttacctggcactgtaaacctctttcgcacgaaccgtaaaagcctggaccatattagccgccagctctttaaacacgcgaccaaaggcgagttcaatcaacttattggtaaactcaaagtcgagatgaaactcgatacgacacgcctcctggctcagcggcgtaaacttccatccaccaatcaatttcttgaacggcccatccaccagattcataagaatactttggttactggtcaactggttgcgggtagtaaacgttttgctgatcccagccttagagacatctaccgccgcagtcatctgcccaggagtggactccagaatccgacttccggtacaacccggcaaaaactgaggataagactgaacgtcattcactaactgatacatttgctccgcgctgtagggtaccagtgcggtccggctaatctgaggcataacaatttccatcaacaaaaatccaacaaataatatcatttatcctgctgtaaaaaaaacgctatcccggcgctgggtaacatcgggttcatgctaagatagagccttgtcccccgcaggattgatatggggtgttttcgatttcagattaccgatgattcacgacgcttatgacgaagaaaaaagcacataaacctggttcagcgaccatcgcgcttaacaagcgcgcccgtcacgaatactttatcgaagaagagttcgaagcgggacttgccctgcaaggctgggaagttaaatccctgcgcgcaggaaaagccaatatcagcgacagctacgtccttctgcgtgacggagaggcatttctgtttggcgctaacatcacgccaatggccgtggcctccacgcatgtggtgtgcgatcctacccgtacccgcaagttacttctcaaccagcgcgaactggactcattgtacggtcgcgtcaatcgagaaggctataccgtagtggcgctctccctgtactggaaaaatgcctggtgcaaagtgaaaatcggcgtcgccaaaggtaagaaacagcacgataaacgttcagatatcaaagagcgcgaatggcaggtggataaagcacgtatcatgaaaaacgcccaccgttaaacctgcactccaattattgaccagttcctcaccgcgcctccctctccggcggcgcgaatgaacatcttattggctatcacatccgacacaaatgttgccatcccattgcttaatcgaataaaaatcaggctacatgggtgctaaatctttaacgataacgccattgaggctggtcatggcgctcataaatctggtatacttacctttacacattggggctgattctggattcgacgggatttgcgaaacccaaggtgcatgccgaggggcggttggcctcgtaaaaagccgcaaaaaatagtcgcaaacgacgaaaactacgctttagcagcttaataacctgcttagagccctctctccctagcctccgctcttaggacggggatcaagagaggtcaaacccaaaagagatcgcgtggaagccctgcctggggttgaagcgttaaaacttaatcaggctagtttgttagtggcgtgtccgtccgcagctggcaagcgaatgtaaagactgactaagcatgtagtaccgaggatgtaggaatttcggacgcgggttcaactcccgccagctccaccaaaattctccatcggtgattaccagagtcatccgatgaagtcctaagagcccgcacggcgcaagccctgcgggcttttttgtgccctcaatttgtcccgcgaagtccgaagagaactaattaaatccgaaccttttaggcccattgataggcccaacgaaaagctctattgtttacgttgggcctaaacgcagggagactccccatggcaagaaaaaccaagccgttaactgatacggaaatcaaagccgccaaacctaaagatgccgattaccagctttatgacggtgacgggcttactctgttaatcaagtccagtggcagtaagctttggcaattccgttactatcggcctttgaccaagcagcgaaccaaacagagcttcggtgcctatcctgccgtctcgctttctgatgcacgtaaactcagagccgaatctaaagttttattggcgaaagacattgatcctcaggaacatcagaaagaacaggtgaggaattctcaagaggccaaaaccaataccttcttgttagttgccgagcgttggtggaatgtgaagaaaaccagcgtaacagaggactatgccgacgatatctggcgctcgcttgagagagatattttcccggcaatcggtgatatcagtatcactgagattaaggctcatactctggttaaagcagttcagccggttcaggccagaggtgcattagagactgttcgccgcctttgtcagcgtattaacgaagtcatgatttatgcgcagaacacaggcctgattgatgctgttcctagtgtaaatatcggaaaagctttcgagaaaccgcaaaagaaaaacatgccaagcatccggccggatcaacttccgcagctaatgcacaccatgcgtacggcaagtatcagcatgtccacaagatgcctgttcatgtggcaacttctaaccatcacccgccctgccgaagctgctgaggctcgatgggatgagatcgatttcaatgctagcgaatggaaaattcctgcagctcgaatgaagatgaaccgggaccatacggttccactatctgatggggctcttgctattctggaaatgatgaagcctctcagtggtggccgagaatttatctttcctagccgtatcaagcccaaccaaccaatgaatagccaaacagtgaatgcagcactcaagcgtgctggcttaggaggtgtacttgtttcacacggcttgcgttctatcgccagtacggcactcaatgaggaaggatttccacctgatgtcattgaagcagcgcttgctcatgtagacaaaaatgaggtgcgtcgcgcttataaccgcagtgattatcttgagcaacgtcgtccgatgatgcaatggtgggctgatctcgtaaaagcagcagatagtggtagcatcgttttaactcatttgagcaaaattcgtcttgtcggataaaatatttatcagcccagctctctgggctgatatttctaaaagatcgcactaaatagctacgcggaatagtgctctactttcgtttagccctttcagaggtaagacattagggcaatttcactgtatgactgcgcagtcatcgagtctgtggggtgttgctccttttgcaacgtatcacttgtcaataaatagaaagtgtagatgtattaggcgcagctatttagtctatatggcaagtagtaattatttacttcttttttttctacgaacagcgctatcgaaagcttgttttacatcttcattttttaaagaccattgatttaaaatagtatcaaccaaagcatcttgactcattgttgctacacgatattttttattttgattatttatctcaaactctgacatttgaataaaatcccatagcggttcgataagttcattaactgctacaaccttatttttccacccatcattcggaacagagtcattaattagctcaaccaacttcagttgaatgatatggtacacttccgctttgcttttgccacccttctttcctgcactccgcctgacttctgataattttttttgattacaaacagagatgttaaaccaagtcatacctatgcacttatcaaataactccgcagcccgatgaaatgctttaaaggcaacgttttcattttcagacatgatagattttccccagaaaaaagagattgaggcgaacataaggtgtgccttgaaaatgtcattaatggaaaatggctcgataacaagaggtaaaaacgtttccttggtaaggtttgaacttagatttttccagcattcttgagctggatcatataattcagtgtattcttcctttatctccagttgcccattcactgtatggtgccttgtttcccatggtacatcgcaggaatataacctcacacgagtacctattttctcagagctccagaattgctctcgcattctgcctagctcaatccgtatttccggatgatcttcctctagaacatcagtatccaccgcccattcgcattcggacatgtgataggcgagatcacgtcgttttctacaaatttgttcataaaaatcattcagagaaatcataaaaccaccataaatcaatgtattagaggttgtaaaaattgtatttttggtacatgggttttttgccttaaagatacccattaatctctctgcaaccaaagtgaaccaatgagaggcaacaagaatgaacaatcgatcggccgttagaatactacggttaccagcggttatccaaaaaacaggtatggcacgggccaccatctatgactggttgaaccccaaatcaccacgatacgatgccacctttcccaaaaagcgaatgctcggcgtgaaatctgtcggatggattgaggccgagattgatgagtggttatcacaacgctgtaaacttatttgagggtgttacatgaattcatactcaattgctgtcatcggagtgtaaacatcctgctatttccgccattaatagcggaatagccatatttgctaaacaatttcttaatttaattaaataagaggcattgcatgttcaatggtcgtcctttccctgtagatgcatttcctaaaattatcaggaatgcaatttatgaagtggaacagcatacgcaggcccctcaaggtttgattgctgcttctgctcttggggtaatttctcttgcctgtcagaaccggattgatgtttgccgattgaataatctacgtggcccggtatcacttttcttaatgactctggctgaatcaggtgaacgtaagagtacggttgataaactgctgatgaagccattatatcaactggaagaggatttatttgaaaaatacacccacgatcttaccgcatggagaaatgatgaagcaatttttaatattgaaaaaaaagcactgatgtcaaaacttaaatcagatattcgacgtaacaaagatcacttggcaacaaatgaaagacttaaagaactacttacgacaaacccgaaagctccagtgagattcaaatttttatttaacgatgccacacctgcagctattaaagctcatctctgtgggcactggcgatcagtcggcatcatgtctgatgaagctgggatcatttttaatggttacacacttaacgagctgccgtttatcaataagatgtgggatggttcaatatttacggtggaaaggaaaaacgagcccgagaaattaattagagatgcaagaataacactgtcgctgatggtccagcctaatgtttttaagggttatatcgacaggaaaggagatatggcaaaggggattggattttttgcacggtgcctcatgtgccagcctgcttcaacacaaggtaacagaaaaatttccaacccaattttttcaaatgaacatttgccggtatttcaccaacgtcttatggaaattgttaatgagagcatcattaaaattaatgaaaataatcgcatctgcctccgattctctgcagaagcagaaagacattggatcgaattctacaaccaggtcgagtcagaaatgagaatgattggccttctttatgattttaaggattatgcttctaaaatggcggagaacatggcgaggcttgctgccttacttcattacttcagcggtgatggaggcgatatatctgttaccgcagtaaaagcagcagtggagatagtggcttggtatattgaagaatacatccgcttgttctctaaaaaagaagagttttctttagatgtttcagaagcagatgagctttattgttggataaaagattactgcacgcaaaaattttcttcctgcatcaagaaaaatattatcttacaatttgggccaaataaatttagaaatcgtgacaaggcaaatgaattaattagaatcttaatttcacaaaacaaaatatttatatcttcatggggtaaaacaaaaataataaacataactcattgtgttttttgattttaatgacaatctaaaaggacttaatttaagagtaaaaacaaactctaaacccagttcggataaaagcttgtcatcttgataggtaatatataggtacatagacacatcagaacgatcacttactccaatatcattggccaggatactatatgacatacgatagtgaattcggatcacatgtatccctatatcgggatagaatcaaacaggttattgatgactccctaaacgaacatcttaactcaatgattctacgtgttgatctgcatgacccaattgatacagaaaatatggataacccattctttcaacccagggttgactctggtgctatatctcgctttaccagtgcgttaaaagcaaagcttaaacatgataagcatattaaaactcaacggaaagactggcctgatagtcgacattccactttacgttacgcatgggtcagagaatataccaaaaatagaaagcggcattaccatttgatactgtgtttcaatcaggatgcttattatcatttaggtgattacgacttaaaccgtaacacgttacgtacaatgataacgacagcttggtacagtgcacttggcatccctatagatagctcggggaagttagttaattacccgccaaatggcaaataccttctcaatcgtaaaagggacaactttgagcagacttatagcgatttgatgaatagggtggattacatgaccaaagtaaggactaaaatagtcggtgacggagaccgtaatttcggctgcagtcgcgggtaatttattttttacaacaatggcctttcttatggctggaaaggcctgatttgtttgtattaagatatcggtaatcttttgatggttggaagcccgtcctggtagacgacctagcctaccgaagatgtgagttattcaaaaatgtcgctttcccgcgttccgtagacaaacgtacctaaatcaatgtcgtctaataccgagcgcgcgcctgataaacatctgatcaacgtacccaatcgatctactccaaatgtcctgagtatcccgaagatactggctcaactcatccacatcagcctcgtcggaaaattccagcaagtctaccagtcggtgtaacgtctgaatgggaatgccaatctcttctaaggcattgacacctggtggtagatggaaactttcgaacgccaatttgacatgtgtgtaatcgactttgctgcgtataccacgctttacagcgtggtgtttaactacatcctccatcaagctgagcaccttaggtagggtatagccgaaggtattggttatgagcttcaaatcattgttgagggcaatggaaagagtacgtttctccccttcagaaatccactgtcgtgcataatcgatctgatttttcagatattccgaataactttcagcacttaaatagccggcaagttttgcgatcatgacatccgtaggcttaacagggaccccattgcgactgaacgtatggggaaccagtctggcaatgatctttgcaaaggtcttgaggaagtttgtcgcgggagtccagtgaaacactaacgaggaaaattcgttatcgtccatcatctcgaacatgctttgcagcatttcgaactgctcgacacggaagtacgaatgcttcttcacaaggtcgatggaaacacggtcgtttatgaaaacctcatcaaagcgatcctgtgaaaactcggacaagtggtctggttgaacgctggctaacaggttgattggggtatcaatgccctgaataccgagcggaatatccacctcttgattgagattgtcttccgggatttcctccaggcaaaagattttgccgacgaagtgaacgcccatgcgcccggcgcgacctttgatgttcccatgggtgaatttgtcaatgctgcgagttccatcgcggttgtcgtagatcacaacgttcttagcgatagtgttgactccttcaatgatcgtggaggtgcagagcaaaaagcgcagttttccagcattgaattggtcggcagtgtattgctgcagtgccctcggtagcgcgccaaaatgcaagccaataccgtttctaagggcgactgtgtaatcccagtcggcatcgaactcttcgctgacccagtcgacatggggattctcagtcggagtgccatgcccaagcctgatcagctcgcgcgccaccaggcccgcaacagttggtgacttgcaataaatgatcgttgcgtcgacacatgcgtgcgcgatttcccccagcgctttgagcttggctttgtcgtcattcgctttgatgccgaacgtcttaacatctagcgcgactgtattgaagtcggtagaaacgaaagtatgcggatatccaagtttttcgagaccgcgaatgctgttaacgaacggtcccgtcaggtaaaactgcctggagaccttaagcagtttgcttaacgcaatgttgagctcgatgactcgttcgtcttgatgatcaatgtccccgcttttcagttgtcggaacgccaacttgtaaaactcgtcaatgacgaagaggtcaatgtcgacgatgtcgtcacgctcgttcactcgctcctgagttaacacataaacagcctgatcggaatggcacacttgggaactgtggtggatgatctgatatcggtcaccgaatcgctcttgcagtcggcgacgggtttcgtcggcaagagccacggttggaacaaccagaacaagccgtttcaaagttcccatgccgagcaatgaatcgacgattgcacttttgcccatgcttgtaggtgcactcagcaccacgttttgaccagacttgagcagatcgaatatgtggaactgcattgagtggaaaacataaccatccgagaatggcgtccggtatagctcaagcaccctcaggtcatccggtgtcaggctggtgaactcctttttgagatacgggaacaaacctgattttctcaccatatttttcaaaattgtggtgtgctcggaaaaccgctcgcgcgaatcgagagctcgcacgatcaagtcccgtcccaagtcatacgaaacagggttagacaacagcttgttaaccgcaaacagataattgaacgatgagaagtcctcaccctgcaggctatgtttcgcctgttcatagatctctgtcatacgacctctctcaccttctcatcaactaattgggttaaccgctcaagactcggggctggataaatgaatacgtggatgcaaagattcgcaaacggcgaatcctcgatgaggtcagccgcgaatttttcgaacagcaccgctgtttctttctccaggtcatcctcgaaccccggcgtttcaggctcggttagtagattagagtcgtagcccacgaacagaacaaacgtgaaacgatcgaggtgagcatcgaaaggttggctgccatcaagaatttcgtcaatgtcgtggcgaagcaggtagttatcgtctttaatgtcgaggatttttttgcgcgcggtatcgatgcaatccgaaatgtcctcgtacaactgatcccgtatctccggcaatctgacggcaatgttaatatcagtcaccaactcgctgaagccaatccaaagctgatcaccttctggatcgcggcgaacgatatgcacgttttcaagaattttttcggcccctgctttttccacgtatagcatgcaaggaataggctggctttcgtggtgctgccggatcgttgcgtgcaacagcactcgacccaaaaattcgctgacgtcatggagcgatttgaagacggaattctttagtcgttctcgcttttcaatgaatgtcagtttatgaatatcagacatttcttttggtcggagaaaaacctcatccaaccattgacagacgttatccgcgatgtgcttgtagcggtatttcttaagtgagtactgctgatgtagaacctggcctttacgcttagcgcagaccgaagccataggcgctctaaatggcgtaaggatgtggggtaagtcccgtttgacgtagattttgcggcctgaccgagattggtcatcttcgacacgctgcttgaaccactcaagtaggtctggtcgtaagtaggacttgtcatcagcactgtgaatgcgtcgagaatgctcgcccttgcgcgtcacagtatcaaggatgcggcaccaaatgtcttcggcgacggtttcggaactgagaatgaccccatgtagatcttgggaggccagccgtatgttcttgatccctagaagttccagttcgcgcagggatgaaaacacttcccatgtagccgcatcgatccaatctgaaacgcttatacctgagtctgttaaaaaattgtctgtgcgtttgttgaggtcatcgatgagttcctgtcgacctggcttatctagtcgggcgtttgggctgatcgtcaagtactcaagggttttgttgaccttttcctctgtgacgatggagtacctacgtccaagggacaggtcagactcacactgcattgatttgtgcaaaattgaactgcaggggatcgtctttttatcagcaccttttgaattctgaacgatgtccgaaatgttccaacgtgttttgccggtgctttttacctgaacgaagtcgatgtatccatcagatacaatgtcgatatcgtctgtgacctcgcagcgcacactgcggatagtcttgtcacgaagcattcgggtgacatggtaagcggctacgcagtcctgaaataagaaaccgtgcttggcggctactccgcctgaatcgttcgactccatttagacatccgtgacaattttgcgaaaattaaggagatgttatgacacagtccaatcggatcactgcatcatcaccagtgatctaaatacttcacagccattctcggtcgcaggtatcaagcttttcaggattccacaaatattgtaaccctgacgtctaatttggttatataacatactgccccaactaacgtaaggtaggcacagccttaatcaaggttttggttttcaaatagttcagagctgagaccgccaaccgcactatggcactatggcactatggcactatggcactatggcactatggcaccgccagcgattgtaatcacacttgatattataaaacacagttgcacgcattatttcctggttggtagggtcatatctcgatgctctttgagcaatgtcaacatcgcgtgttcatggctttctatattgttgatgccttgcccatccggaccccactccttatagctcatcatgatggcttgttttgggctctctgctcgttctgtttcgacgtagaattttttcttgtctgctggcgaataattactaagtatcgagttgctgcttggtgagatcaggaagaggttaccgaaacgatggacatcatcccccattttgtggactgcccccccggtagacgatcctgccctatagttggagtgccccctattcaggtggctaaatttagcaaatcaatacacttcaggggggtattattgtagagtttccccatatgtttctatgggatccaggaaatgacaatcaggagttacaaaaacttaaatctggtcagggcaaatatcgagactgaatccagacaattcattgaaaataaaaactattcaatccaatcaattggtcctatgccagggtcaagggctgggcttcgggtcgtatttaccagaccaggggttaacttggcaactgtggacattttttataacggggacggttcgactacaattcaatatctcactggagccaatcgttctctgggccaagagttagcggatcatctttttgaaaccatcaatcctgctgaatttgagcaggtaaatatggtactgcaaggatttgtagagacaagcgttctacctgtacttgagctatcagcagatgaatcgcatatagagttcagagaacactctcgtaacgctcataccgtagtgtggaaaattatttccaccagctatcaggacgaattgactgtgagcctgcatatcacaacaggtaagctccagattcagggccgaccgctgtcatgttacagagttttcacgtttaacttggcagccctgcttgatttacagggtttggagaaagtgctaatccgccaggaggatggtaaagctaatattgttcaacaggaggttgcccgcacttacttgcagactgtaatggccgatgcttacccgcatctccacgtgactgccgaaaaattgctcgtttcagggctatgtgttaaactcgccgcccctgatttgcctgactactgtatgttactttatcctgaactacgcaccattgaaggtgtcttaaaaagtaagatgagtgggttaggcatgccagtacagcagccggcaggttttggaacttactttgataaacctgctgctcattacattctgaaaccgcaatttgcagctactcttagaccggaacagattaacatcatcagcacagcctatactttttttaatgtggaacgtcattctctgttccacatggaaactgtggtcgatgccagccgtatgatttctgatatggcccggttgatgggtaaagccactagagcgtggggaataatcaaggacttatatattgtttgaaatcaccggaattaacgtctcaggggctctaaaagctgtcgttatggcgaccggcttcgagaaccctttgtcctcagttaatgaaattgagacgaaactttctgccctactgggtagtgagaccactggtgaaatcctttttgacctcttgtgcgctaacggtccagagtggaaccgcttcgttacgctggaaatgaaatatggccggatcatgctggatacggccaaaattattgatgagcaggacgttccgacacatatcctgagcaaactgacttttactttacgtaatcatcctgagtacctagaagcctctgttttgtctcccgatgatgtacgccaagtcctgtcaatggatttttgaaactcttctttctaaacgaaccagtatagaattcgcccttttggcatgatattaacttgtccaatatgatcaaatagcattaaccccccctcacaacgtcctgcatagggaacacgttttcccctgtgcacccacgactaaatttccccccctttaaacttctcaataatgtcaccaattttctggaaatcctatgatgcctttcccggtaaatggtgctgtgagttcagaaagattctgcaatctatgtgcattgaaaaaatcttcagatagatatcattctcctgaacaatccgatgaacggcagaacctcgcggttctgccgtttttgttttacttttcagaggagtggtgatgaaaaattttgaagttctgcagccactacagaactccctttccggtctaccgctatgggtatctgaacgtatattgcagcagataaatcagttaacccactacgagccagtgatcggcatcatgggtaaaactggggcgggaaagagtagcctttgcaatgccctgtttgccggtgaagtatcgccggtcagcgatgtagcggcctgtacacgtgatcctttacgctttcgcctgcagattggagaacactttatgaccatcgtggatctgcccggcgtgggcgaaagtggcgttcgcgataccgagtatgctgcgctgtaccgcgaacaacttccccggctcgacctgattctgtggctgattaaggctgatgatcgggcactggcgactgatgagcatttttaccgtcaggtgattggcgaagcataccggcataagatgctgtttgttatcagccagtcagacaaagctgaacccaccagcggtggaaatatcctttccacagagcagaaacaaaatatcagccgcaaaatctgcctgctgcatgagctattccagcccgtgcatccggtgtgtgccgtgtcggttcgcctgcagtggggactaagggtgatggcagagcggatgattaagtgtctgccgcgtgaggccagcagcccggtagtagcgctactgcaacatccctttcgaacaacggtagcccgggagcaggcacgtgacgatttcggtgaaaccgtaggtgccatactcgatacggtaagcacctttccccttattcccgccccggtgcggaccattattcaggccgtgcgttcctcggtggtgtcagtggcccgcgctgtctgggatttcttcttctgagtgtttaattctgccctattattctccgagccctgtcgcaagtgcggcagggctttctttatttgttttacccatactgaggagtctgcttatgacccgtctggcttcgcgctttggcgctgcaaatcttattcgccgtgaccgtccgttaacccgtgaagagttatttcgcgtggtgcccagcgtattcagtgaggataaacacgaatcccgcagtgaacgctacacgtatatacccacaatttccctgctggacagcctgcagcgggaaggcttccagccattctttgcctgtcagacacgggtacgtgacccccgtcgtcgtgagcatactaagcatatgctgcgcctacgtcgggaggggcaaattaccggtaaacaggttccggaaattatcctgcttaactctcacgatggcaccagttcgtaccagatgctgccgggcatgttcagggcggtgtgccagaacggtctggtctgcggcgagtcgtttggcgaggtgcgggtgccacacaagggggatgtggtgagtcaggttattgagggggcgtatgaagtgctggggatttttgagcgtgtggaagaaaagagggatgccatgcagtcgttgcttttaccgccacctgtgcagcaggcactggcaaaagcagcgcttacgtatcgctttggtgaggaccaccagccggttactgaatcgcagatactctccccacgccgctggcaggatgagagcaatgacctttggaccacctatcagcggattcaagaaaacctgattaagggcggactcagtgggcgtaatgctaaaggcggacgaactcatactcgtgccgtgcgtggcattgacggggatgtgaagcttaaccgtgcgctgtgggtgatggcagaaacactgctcacgcaactgcagtagacgtttcatgttgccacgttgttaatatcggacaccacctgtccgcatcgctatgtgctcgtgtgcctcaatcccccggttatagcttttaacccccgttacatctggcttttgcagaaataaaaaatagtttctgcgttgtccataccctgtccgcccccctctttaaagtaatcacatcattttcagtcagttaactttcctggagaatctctcatgacacaggcagaacgccgccatgaccggctggctgtcaggctgtcactgataatcagccgtctggttgcgggtgaaacgttgagcgtgcgcaaactggcggctgagtttggcgtgtcagtgcgcacgctgcggcgtgattttcgtgaacgactgatgtatctggacctggagtatcagtccggatactgccgcttacgcactgctggcagtgagatgcagatggtgcccgacgtgcttatctttgcccaccgcagcgggctggccgggctttttcccggccttgaccgccgtctggtgaatgcactgctgatgtgcgatgagtctccctgcgtgatagcaccagccaatccggttccttcgccttcaggagcattgtctttctggagactgattcaggccattaccgggcgcaggcgggtgacgctgattgcagaggggcgacgctgtgagcgcctagctccctgccggttactcatccaccagcagacctggtatctggtggctgaacacgaagggcatatcgccgtattcacacttgatgaaatccatctgattcagcctttgcaggagacttttcgccgcaatgacagtctgtgtcgcctggttgaagacccggtcttcattcaggccttaccccattttcgctttatccagcattcactgcttacgtttgttccggccgacagcccaccggaatagcgcaggcgttgttatcaacccggcaacatggaggagcccagtgcccgttattgccattatcgccattgttatcatcgtcatcattctgaacaaaaccggagtgtccgacagcctcacggccctgacacttgcaaccgttgccgcactactgacgggaggtggtgcagccggtgctgccagtgtcgcgctgacgccgttcgtcggcgtgccggtgggtatttttgtgggaatttatgtctttgccaaagtggttcgtctgatttcagggaaaaaataatgaaacgtaaaacactacctctgctggcgctggttgccacctctctgtttctgagcgcctgcgatgacaggagtgatgacctcaaagctatcagtaaatttaaggacctcacgcccccgcgcttcagcgatgtggtcagccgtcaggatgatgtcagcgaagaatggtcacaggttggcttctcatccggtctcaccctgcaggtcttacgtacccgtgagtcgcccgatggttgcgagggtggcagttactactatctggtagatatggaggagaaaaccgtccagccgctgatgaatgcgctttgtattgccgacaatatcaaactggaataccacgaagttacggacccgtatacgaaagaaaaatacttcgaatattcccatgacggcaaactgatgggacggctgctgataccgtcaaaccctgataaccgggaataaaaacaacgagaaaggagacataaatgaaaatacgttcactaagccggtttgtactggcaagtacaatgttcgccagctttacagcctctgcggtccccggactctggcaacaggggtacggtcagggcaatgcggaatacagtgtgacggatgccagcggaaagatgtttaccatcaactgcacgggaaatccggaccagaacggtatttaccagcactcggtttttctgatcctcgccggggataaaacggtcagctcgcatgatgacagtaccggcatcacagtggtgatggaccataagcaatatgccattccctcaacccttggctggcgtaacggagataatgcctggttcagcttcatcatggatatccgtaaggcccggcagttcgacgtctacgtcaatgaccagaaagttggatcgtttaaccctgatgttcggaatgcacaaaaggtcctgccaacattagcggactgcactaacgactgacggctgcgccttccctaccataacaaccctgattgcctccggcggtcgggggtttcttttttctccttaatctccagaggtaggccacgtactttcgaacgatgagcgcagtggtcagtttttttcagatatatttatctttttttggctgtaagctccgctgtgagcgcaggctgtgttaaaactcctgatcactttttggtctaagcgatggtttcatatgatcaaccattcttgataaacccatgagacggactaactttttcattaaaattaaaaagatatgaatgaatactgcggatatcaacatggccaatcacattcaaggacaaggcaggcatcaggtgacattgctccctgatgcactcgatgattttgtcactgaagatatctgaaataagtttaatcagttcatcacgggtcggtggcatatcgagataattaattattgtcggttcgttgccgttgttatgaagcatctccagcgtgttgcgtgaggtgccacaggccgggttgtgatagatggtaatgttgctcatatcagtatctaattacaaagtgacagagagccgccacgccagcgcggccagagtgacaaacagcaccggcacagtcatgacaatgccggtacggaagtaatatccccaagtgattgtcatatttttctgggcaagcacatgcagccacagcagagttgccagactgccaatcggggtgattttcgggcctaaatcacagccaatcacattggcataaatcattgcctctttgacgacgccagtcgccgtactcccgtcaatcgacagcgcaccaatcagcaccgtcggcatattgttcatcactgatgagagaaatgccgtcaagaagccggtgccgaacgtcgctgcccataaccccttgtctgccagcagattcagcacgccagacaggtactccgtgaaccctgcattgcgcaggccatagaccacgatgtacatgcccagtgagaaaataacgatctgccatggcgcaccgcgcaggacttttccggtgttgatcgaatgacctcttttcgccaccacaaacagcactgctgcgccagcggccgctatcgcactgaccaggattccctgcggctccagaaagaagaaaccgacaagcagcaataacaggacaatccagcccgccctgaaggttgccagatccttgatcgcactggcaggcgtcttcagcagcgaaacttaatacgttgccggaataactctgcgaaagaagagatacagcataatcagcgtggccgcaatcgctgccgcatccacggagatcataacggaggcgtactgcgcaaagctcagaccgaagaagtccgccgagacgatattcaccaggttagaaacaatgagcggcaggctggccgtatctgcaataaatcctgcagccatgacaaaggccagtgtcgtgccctggctgaacccagtgcgatcagcatcgcaatcacaatcggcgtcaggatcagcgcggcgccgtcattggcaaacaacgcatcaacagcggcaccgagcaagactttccaggtgaacagcgctctaggtaggaactttgtcgttgatagagtcttcagccatcaacactgtatcgagtaatgaaattggttgctagaaagtcgatgatttgttgcgtatgattaaaaatcaaccttaaaggctttatacatggatttgctatggcttttgtatcagaaagagaaattgtaagaaagatatttagcaaaaaaattgactttacgatcttggcatttttctatatttcctctattttttttcttctttgtagtggcgttctctttcaatattttaccgctgccttcacaaaaggtaattgttatgaatgctcaatgaaacttgattacataaaacaattttatttttcactggaaaccgcatggtacctcatatctgctgttgcagtatttattgcatctgtttttatacagcatagaattaaagcttatttaacattattagctattacatggattgtactaacaataacagatgtggcgttaatacacgccttagacaatatagccatgaataatattttgttaaatatactatataatctttttggggcgattttattgtcactgtttatgtgtttatcaaattccctccttttccaccttaataagataaaacatattccaatgattttatcggcaatgattccattagtttccgcaataataatagccatactcataaccgctgttatatatttattgtttgcccggcaggcggtagagattgagatggatatatctgaaggttcagacatcgcatatgtaggtgtaaaagataatgaggaatcatttgggtttttaaatgataaaaaaacagacacaccaacgtatctggatgtaatcaaaaatggtagtttgatatataatgatacacagggtttaagtggtgctgatatttatattgtctccggttgttatgcccttccagatttacttcgcaatgtaccgcttgatgctaaaaaatcttttctgaatgtaaaaaagctagaaatcacacagaaacttccaatgatggggttcatacaaggtgaatccgctgatgtgatgcctaaagcagcatccaggttaagtttgagcaagcaagatgataaatttatgctagcctcaagtgttactgactctcaaataaaatttaaatcaaacaatgcacaattgatggttgctttcgcatttatgccaataacaacgaatggtattttacatgattatacatacgatataataataaatgataaaaaatataaaattgaaaatcatgttgcacctctatctaggcttgataaaaataagaagatgaagtgtgaataccagcaaatatcggatttaacaaatacgtataacattaatgcaaattacttaacgggttttttacttgtcctaaaaccagatgatattattaattacaacaatagcccttccgtactactcaagactgattttgcgttctataaaaaaacataccagaagcttgataaaatatatgatgacataagcaatggaaaattatcttcactgagagcaacaggtatctcccagtttagtatcaacgggaaacatttgtcgttaaggccagaatcggagattattatttctgaagggagtttgtatggactagttaataaaagcaaaaaaatcaaaatatatggcacagcagatcttgtttttgttgataacaagataatgaaccttcgtaaaataacttatttgcaatctaagctagaaatttttggttcttctattatggatatattaaagtatatatttggtttaggtctgctagcaatttctataaaattcattcattcttactttaagaatgatgtgaatgaaaatttattcttgtaacgcatttggctccaattggagcctttttatgactatttattaaaatatcctaagttaagcctgtttttaaagcaggcttgagcgtgaagcggacactcatacctgctttaaagtggcgtttttgtcgttacccatacctatattttctgttgtttaactgccagaactgagcggttgaaaagccagaaatatgccgagccagcggcatggaagcgccagcagctgttgaatggagtactgtaggcaaatggtgccgtaaccggctttcgtactgaaaggttctgtctatcccatcccttctcttgtatctaacatttagttgtgaatagctactgtaaatgcccctacaaaatgaaccattatttttagagggcgtctggcactccaacttccgcttttggcacagaacggcctatcagcaatataaaagcattcagatatatatcatttctacaaacatacccgattaacggcagaatctcaggattctgccgcttttttattatttttcaggggagtagtaatgagcaactctgaaggttggtagtcattttagcaaacgctttctggtctgccgcagtgggcatcggctgattgcgtagcagggccactggtatctgccggtatcaccgacattaacattgaagacgaccagggcattcacgtccgcctgatagttcgtgatgccgaaggtcggatggttggcgggcatggaactttgaaccggacgccggtgaaggttttaaccgctatatccacaggtcaggcatccgcaccgacaccttcccccgctgactccgaatcatttaccagcaacatttcaccttcccaaacgcgctttattacctcatacgccagccatcgccgctggcgttttttattcacggagacatacccatgacaacacagacacagtacgacctcgtacccgctaacggatccgaatttgagttgagcgtaacgcaggtacccgatgaacagcatatccgcttctggccgcagcactttggcaccatcccgcagtggataacgctggaaccgcgcattttcgcctggatggaccgcttctgtgatgagtactgcgggggtatctggtccttttacacgctcagcaatggcggagcgtttatggctcctgatgctgacggtgacgataaatggcatttgctcaacggcatgaatggcaatggtgcggaaatgagcgcggaagccgcaggtatcgctgtctgcctgattgaatatagccatcacgcctgcctcaccgaatgcgatgccatgacggagcactattaccgcctgcgggattacgctctgcagcaccctgaatccagcgccattatgcgcattattgattaaggatactcatgatggaacagtcactcatcccacagacaccggtacttccactgaccgcacaacgcacggtaaaacgcgccttaacgctgcttgaccgacacctgcgcgaaacaggcgtggcattcacctccactcaggctgctcgtgactggctgaagctgaaaatggcggggctggagcgtgaagaatttatgatgctgtatctgaaccagcagaaccagttgattgcccacgaaaccctgtttgccggttctattagcagtaccgaggtacatccccgtgaggtggtcaaacgcgccctgtatttcaatgcagcagcagtgatactggcgcataaccacccctccggcgacactactcccagccaggcagataagactataacgcagcgtctggtgcaggcgcttcagctcgttgatatccgtgtccctgaccatctgattgttggtggcaggcaaatctattcgttcgcagaacacggtctgctttgaggtattacatgagaattatcagtaaacgccgggcaatgacgatataccgccagcatcctgagtcccgaatctttcgctactgcaccggaaaatatcagtggcacggtagcgtctgtcattacaccggcagggatgttccggatatcacaggagtcctggctgtgtacgccgaacgccgcaggaccgcagcggaccgtatgcttgactgatgagtatcaccctgaactgacaataaagaggttatgaatgagcaacaccacatggggcctgcagcgagatatcacgccgcgcctgggagcacgtctggtgcaggagggcaaccagctgcactatctggctgaccgggccagtatcaccggtaagtttagtgacgccgaatgtcctaagctggatgtggtatttccacattttatcagccagatagagtcgatgctgaccactggtgaactgaatccccgccatgcccaatgcgtcaccctgtaccacaacggttttacctgcgaagccgatactcttggtagttgcggctacgtatacatcgctgtttaccccactcaacgctaactaatttcacgagagcaagcatgaacactctacctgctacaatttcgcaggcggcgaagccctgcctgtcgccagtggctgtctggcaaatgctactgacacgcctgctggaacaacactatggcctgacactgaacgacacgccgttcagtgatgaaactgttattaaggaacatatcgatgctggtatcactctggccgatgcagtcaattttctggtggaaaagtacgaactggtacgtatcgatcacagaggattttcgtggcaacaacagtctccatatatttccgtagtagatattctgcgagcaaggcgctctaccggcttgctaaaaactaatgtgaaataaacgcttaaatacagagcagactgaaggaaagcaaaatgctaatctcatagacgaagagactcccgctgtaacctcccctcccccgaaaaaacctgacattttcttttaggaccaacaatgggaccaaaatgaaaattgaactgaagattacaatcaatttaacaacaagttacacaaccaattcagactccgccagcccaccaatcatgattggacggtgtaaggacaacaccaacaaaaacaggaagttagaagtctcagcaaaacaccgaccagacggtgaggagacataaaaggatacgcaaaggagccgcggctcctggtaacatgaaagcccacagatgtgggctttttcgttgatggtcagaacgaccagttcacaccagctaccgcgttccacggggattccacaccggcactatggctataccccaccccaagatgcccgcttaacgtactgctgaatgaggctttaatacctgcctggtatattccacgtctgcccgacaaataattgacgaaattaccgtcactattcactttcacccggttatcatcgacaaattctttgcgcacagccgccttcagccacggctcaacttccataccgttccccagacgcatgttgtaactcagcgttgcgcccagttcacgatatatactgcgggtatcgactgatttcgatttcatgccattggataaatgatattcggggttatcagcggtgaaccccgttaacgatgcatacggcgtcaggttccagttaccatcggtaaatcgcatcccggtttcaatgtgaccgcccagcccgttgctgtggtaactgccattggcggctccaccgctgctcattttacctgctacgttacttttaaaacggttcagcttcacgacaccgtccagatagaaaccactttcatgttcccaactggcatagccgcccagagaataactgcccacactgccatgtcctccgcgatcaaaaccgatatgtgaatgggaatagcccataaaagcgcctagcgtggtaattccttcaggaatatcattacggctgtcgatccccactgtcattccggtcagcgtctgctcaaacccggcacccgcatcggtggtgacattattacgggtgttatacgtcgccccccagacattattgttgtgtggactcgctttcattatgttcaaccgctcgcgaatactgtttagctcagcatcaaataccaacggtaatgttgctgccatattgagtacggctgccgtagaaggcgtaatgcgtttctccggaacgggtgtcggcgttggatcgggagtagggtctggttttggatttgggtctggctttggatcgggttttgggtctggctttggatttgggatggggtccgggttgggtttgacatcattggtcaggttccagttgctgttgccgtcacttttcaggacatactcataggtcccaagatcaacgaaaccgccggtattgcccagcgtaaacgaagcatcccctccccctgttttcaccagcgtcatcgcgtcgtcagactgtgggctgacgccggtatcctgaacaaagattttaaaattaccagtggcgttgttgttgacgaccagttgatcgccccgggagcctgcaacgttggtatgcaggtagaaattaccgctaccggaaagttcattggttgtcagcgtattgtagataccgttagttgtggcaggcgctgctgtttgtgctgacaaataaacatcaccgtcgttgagtagcaaactgtttactctatattcgcagttgctggtacctgcacaggaattattgctgttaagccagacactgccccggctggcagccgtcaggtcggcaagcgtggtatcgacgccatttcccagagtcaatgtcgcgctatcggtaatccggaccgccccttcgagtttaactggcgtaacattatcccgtggcgtcattaacgacaggcttcctgtcgcgccactgaccgatgcatccgccagcgtacctgcgtagacgattgccgtaccgccagcgacctggagatcttctgcccgggccagagcctgaaactcatcttttgaccgcccaagggtatattgcccgccagagttaacctttgtggcggagtcctgacccaggttttgcattgccccacccttgccaaccgtggagtcgcgagcttcggtacctgctaataccaataaattaccgccattttccagcaacatattggtcgctaaattgccggaaatggaaaaagtaccgtactggtgagtaccgctgatttcaataccgttagccgtgctcgtctggagagcggcaccgctgttctggacgatatctgtcgctttgccattatcgttgactgtcagcgtaccgccttcattgatctttgtttttattgcctctccgttagctgaaactgtttgtattccgccgtcgttaattgttgtctcattcgccacaccctcgacaatttgttcaccgccggtgagcgtcgtgcctgtcgcagtggcttttgttttgacgatctcccgtccgcccatattgacctgtgttttgtcagaagaggtgtctgactccacggttaacacgccgccatttgccagcaggatattgttcgccgcaccctgctcgatgctgaacgcgacgccatccgcgcgtgttcctgtgacccgcgtcgccctggtggttgcaaccaaagcgccctggctactctgctgtatccccgttgcgctgcctttctcccgcacatcgagtgtgccgccgtcattaagcaccgagttttcagccaggccgccctcattaactacctgtgaacccccattaataatggaaccttccgctgtcccgtttgccataatttgttgtaggccagagacgatatcggtattgattgccttaccataattctgaacggtttgcgtgccaccattgatgtgtgttttctctgttgacccaccatcaacaatttgttcaccactttcgatatttgcttcagtggctaaaccatataccgtttgcttgccacctttgatatttgctttatcagaagtggcactggcatatattgtttgggtgccagcactattgagtacagtgccaacatcttttccataaacatccattttgccgttggcattaataatcgtgtcaactgcgcgggaaccagtgacgactgttaatgagccagcgttttccagcactacatttttagcttctgaattcctgatgtagaaagcatcaccataactgttggttccttcgataagtgttccggaggtcgtggaagcaattaatgcgccgccggattgttgctcaacatgcttagcctcaccaccgtcctgaacctccagaacgccgccattattaagtctggtgctatctgttttagcctccttctggacaatcagcttaccgccagtatcaatggtagtatttttcgccgaggttttagccactaccgtcagttcgccggtattttccagcacaacataattagcctcccctccggtaatagtgaagtgagagagcttgttgtatccttcgatatcagtccctgcacccgtgttggcaactaaagcactgcccgtctcctggttaaccccatgtgcaataccgccggtatagacaatcagcgagcctccggcgctaatattgctgccaattgccgtaccatctttctcaacaacctgccggctcccggaggatataattgttgtgtcagctttcccgccgcttttgatattttgcgttccgctgttgatattggtgcctgtggctatgccataattattaatattctgtgtgccaccattaattatggtatttgtcgcgtttcctgcaacatccataaccccgccattatctattcgggtcgcatcagctttagcattggttaaaactgacattgttcctttatctttaataatcgtcttgtttgccgaaccatatgcgtttatgtctaaatgaccaccgttttccagcaacacattgtctgccacgtgattgtggatggagaatgcaccttcactattcgtaccgctcaccgtcgtaccgttagtgttagtttttaaaattgcaccatcgtgctgggtaacatttgttgccgtaccacccctaacatcaagcacgccaccagaataaacttcaataacatccgaggtgctggtgttatcaacaatttgcgtgccaccagaatagatatgcgtattttttgccgttgacttactattcagagactgagttccgccttcaatcgtcgtgtccagcgcacggctctcatatactctttgctcaccgccatttttaatggttgttgtttctactgtgctctgttcaacatactgtcgaccaccatttatggttgtgttcgttgccagacttccttgtactacgtcctgagagccagacttatttatcgttgtaccatcagcatgcccttgaacttttactatctggctaccaccatcaatgagtattccattcgcactccctccctctacgcgtgaagcaccgcccttaattgtcgttccattgctgataccccctttataaacgtcctgattgccactctcgattgtcgtacctgtggaaatacccccgtcatgaattgactgtctgccaccgttaatggttgtattattagcctgccccacaaaattgttatgacttcctatatcttgatatccaccagattcaataagacttccattagataccccgccatgaacattctgctggccatggttgataatatgagtgttatttgttgtacctcgttcatccactttttggttgccatctacagtctcatcgtttaccacaccaataacattagtagtgaaggcagccatcccgggcggggcatatatcaaggcagatatcaataaggaaagtactgagcggcgacaataatagggactggtcctgttcataaatttcatcctctgaaaagtgaatactgagtagcgtttaagcgaccttagctttgctgcaacatcagcccacaggcaccagaccaggggattcatcctgaagagacagcgcaagtgtattgtgttcaccgctcatcaaagacatcatgatgaaatgatgatattccgcataagaatgaggcattttttaaacgcagtgcgctgaagtgtggttggataaaaaagtcaatccattcaggaaatacgggcgtattcttttctttcgacaatgaggccgttggcaaaataaaatgatttacataatcgtttctgatgaatatcttctgctcacataaaaatcacacaataactttgagatcgcagattgttttacttttacagcattcgtccccccattgttgggcaaatatagattgggccagagcacgaaagttaataccacgttcgcacagctcctccaacagcacgacaagatgccacatactgcgccccagtcggttcagtttacagactagcagtgcgttccctgccgatgatgtcctgaccagttttttcagtccggacctcctgccacggttttacgttgaagtggtaaccctgagcacgcagttcttcagtcaggcgtggtgcaccgtaacgctgttattgctgggtaagatcaaaaaactttcaggcagctaaggaaagttgaaccagacattagatgaaatatttcaaccaattacagcaccaattcagtcactgccagcccaccaaataaatcaaggggttacatgaaaacgtagcccctttttctttggtagtgacactaaaatggatgtagtgtgaagaataatcccgtttactcaatcaataatacatattgtttcaatctacgttattatctctttgtaaaaattgccatttattaatcattgaaaactgcttttagaacttgatacaacgggactagtcacaacaggactattctcaacgggatcatcctcagaggaactatcatcaaagtcatcatccataaataaaatatcatcgaatggtgccacgcccgtgatgagttttattttattattacgatcagtcaatactccacttaaaccgttttcgctcacaggttttaatgatttttcattactcttgttgtaagcaggcgcattaaaaatacacggagtatcaacatcaaacaatgacgttccccagttcacatattgaatatcatagttactgaagttctgtccagaaaagaagcaccccttaaaatccaatccacgtaaattatataaaccaccctcttctttttggagagtaatgttaattttggctatctcccggacatcatcgccatttttgtatttgaataccgtttcaagatgttctccagacagcttgacttcaggaaataatttgaaatcaaagcctatattattatgtgtcaacgtagatgaacaaaaaatggaaaaagcttgcagtgctgaattatagctatcgattttatcttgaggctgagctcttggtaaaaacttatagcaacactcataaaaattaaacagaagctctgaagaccttgtatttttatcaaataatacccccttgaactcattcacaaacgcatcttttttttcttgaatatctatggggtgttcctttgactctgacaaagatgaaatctcatctattttgttttcatatgaattacgtgattccatacagacatttggcggcgtttctaaaataacactacgcgtactacttggcttaagtaaaccaacatgaaaatcactttttcttatattatcgaaaaggttctattcatttcttttagcgcattcaaaaaactgatcggcattatttttattcgataattttttagtttcagaaaacacattttcattgttttccagctttagtttaatgagaagattttcccagacctgcttgcttaaacatattacgtcaggctcaccagaactaactaactcgtgattattattaaagtgtacgttgaatacctttaagttattttcaccaacttcatatttaatacgttttaattgttctccagctcccataatgacaaaggcgttgccttcttgatatatacattcagacatcattttttgtaaagtttcaagagcaccgcgatacgtctctgatgcagcttccttacaaattaattttaaaatactatgagctagtagctccatgtgtttagaagatttattttcattataacttccactacccaaaactgcgctagcgttaaatccgttgcttttactaactaacattgtctattcctcaattaatgtctacatggctatttttaatgttattactgtttgtcactataaaaaaacgctcatttgagacaattactgacattaactgcttcacttgctacgcatggaacttttaattaaattagcacaggaatgttaaatttaataaacaaaaggttatttcgctgtatgataaaaaaaaccgttataatttattagtgaaaatcgtttttcaagtgttagaaatttatatctcaatagcgttggttaatgagcatagccacgctcctgtaacgctcacaaaactcatctgcctgcggcgggtgttctggtcagtagtagatgtttaaggcgtggcagagacatttcatccttactctacggcattgttctacatacattggttgtggtactcacttatcatcagtgagcgaacagagaatagttcagtgatttgagtaattaacctgattaaatgaaggggtataataaatgataatactctggctttatcgttaattacttaattccacatgtaagcaatttgcccgcttggcatagcaggcattttttccaggtacttttgaatgagtactgatggataaatacattgcagtggcgtgccacgtaccaaaacaccagccctcattcgaaaccacccaccgcacttcttccttgaaatggcgttagtcatgaaatatagaccgccatcgagtaccccttgtacccttaactcttcctgatacgtaaataatgatttggtggcccttgctggacttgaaccagcgaccaagcgattatgagtcgcctgctctaaccactgagctaaagggccttgagtgtgcaataacaatacttataaaccacgcaataaacatgatgatcatatgatgtaaataacagatttttatgcgttcccattcaccttgggtcgtgattacacgcgacataaaacccgacaccgcctccattcgcaaagtcgatactcgcagtcaacaagcaaatgttaataattagcactatctatagttatcatcgattcaatgatactttgtaatgattttgtatctaataatataactttattacattagctgaagagttttcgcatcattatgatatctgttacttttcactccataaaaataaacttcgtatagcaatatattctttcatagatcttattctgctaatcattagtttcgtatgagcgatttttgacagttgcctctccagaccacatcgataattaataaaacagatttaagcattatccttttccatataaatattggataaaagtaggacatctgtttgcaattactttcacaacaattaaacatttttatgtttccgtatacatcatattactctaccattagaggaactttattatgttttctataaaaccaggacccagaaatttacctatcgacaaccccacattgttatcatggaacattactgacggggatctaaattccaaattaaatacattagaatatctaaactgtataacaaatattattaattcttgtggagtttaccctcaaggattaaaagacagagaaattatatcaacttttcacgcagaaaaagttattaatgatctgttaaaaaacgattataaaatttccctttctccagatacaacttaccgagagttgaataaagcagcacagcgtagcattacagcgccagacaggataggagaaagaaaaacataggtttatcaacgagatacaatgattgaaagaggtgataacagcggtgtttatcagtatggtcgtgctgaacatttcacccacattatatctgacaaaccttccccaaaagataaatatgttgcatatgctattaacattcctgactatgagctggcagccgatgtatataatattaacgtgacgtcaccttccggacagcaagaaacatttaaaatattaatcaatctagaacatctacggcaaacacttgaacgtaaatctcttactgctgttcagaaatcacaatgtgaaatcatcacccccaaaaaacctggcgaagcgattcttcatgcttttaatgccacctaccagcagatcagagaaaatatgtctgaatttgcacgttgccattatgggtatatacaaatccctccagtgacaactttccgcgccgacggaccagaaactcccgaagaagaaaagggttactggtttcatgcttatcaacccgaagatctttgtaccatccataatccaatgggagatttgcaggattttattgcattggttaaagatgctaaaaaatttggtatcgatatcattcctgattatacctttaactttatgggaattgggggtagtggtaaaaatgacctggattatccctctgctgatatacgagcgaagatcagtaaagatatagaaggtggtatccctggctattagcaaggtcaggttttgattccattcattaaagatccagtaacaaaagaacgtaaacaaatccatccagaagatatacatctcactgcaaaagacttcgaagcaagtaaagataacatctctaaggatgaatgggaaaacctccatgcattaaaagaaaagcgtttaaatggaatgcctaaaacaacacccaaaagtgaccaggttattatgttgcaaaatcaatacgttcgtgaaatgcgaaaatatggcgtacgaggtttacgttatgatgcggcaaaacactcaaaacatgaacaaatagaaagatcaataaccccaccgcttaaaaattataatgagcggttacacaatactaacttatttaacccaaaatatcataaaaaagccgttatgaattacatggaatatctggtaacttgtcagttggatgaacaacaaatgtcatcactgctttatgaaagagatgatttaagcgccattgatttttcattgctcatgaaaacgataaaagccttttcatttggtggagatcttcaaacccttgcatcaaaaccgggttccacaatctcaagtatcccatcagaaagacggatattgattaacattaaccacgattttcctaacaatggtaatcttttcaatgactttctatttaaccatcaacaagatgaacaattagcaatggcatatatagccgctctgccgttcagcaggcctttagtttactgggatggccaagtattaaaatcaacgactgaaattaaaaattatgatgggtccacgcgtgtcggcggtgaggcgtagcttaataaaggttgctctacctatcagcagctctacaatgaattccacgcattatatatagataaagcaggaatatggagcgcatttgagggtgtatctgcaactaaaaacgttctggcctttagtcgtggggattctgtgaacattaatcactctcctcatgatggactagttataataaataaaggaaacgaagaagttgaaggtacctggcctaacaaattgcaacctggaatatacaaaaacatggggagtaatagcgttaacattattattaataatacccgaaaaattatcccccctggtaaagtatttacgcttagaggcggaactctaaatatcaatattcctgggcgtagcgctcttcttttagggaaaacaggagaaccgccgaactatctctatttataatttaatgttatatctgccccgataaaacggggcagataatatgtttagtttactaacggtcattttgcagtgaagccatttactgttttttatcgaccagataatctgttctctaatgttaactccccctaacctgttgctttagttattcatttcctgtctcactttgccttaataccctacgttaaatgttactaatttgttgcttttgatcacaataagaaaacaatatgtcgcttttgtgcgcatttttcagaaatgtagatatttttagattatggctacgaaatgagcatcgccatgtcaccctacatctcataagaggatcgcttctgatgaatgcactgaccgccgtacaaaataacgctgtcgattcaggccaggactatagcggattcaccctcaccccgtcggcgcaatccccgcgtctgctggaactcaccttcaccgaacagacgaccaaacagtttcttgagcaggttgccgagtggcccgtgcaggcgctggagtacaaatcgtttctgcgttttcgggtagccaaaattcttgacgatctatgtgcgaaccagctgcaaccattgctgttgaagacgttgctaaaccgcgctgaaggtgcgttgttgatcaatgcggtgggtgtcgatgatgtgaagcaagcggatgagatggtgaagctggcgacggcggtggcgcatctgattggccgttccaatttcgatgcgatgagcggtcagtattacgcgcgttttgtagtgaaaaatgtcgataactcagacagctatctgcgccagccgcaccgcgtgatggagctacacaacgacggcacgtatgtcgaagagataaccgattacgtgctgatgatgaaaatcgacgagcaaaacatgcagggcggaaattcgctgctgctgcatctcgatgactgggaacatctcgacaactatttccgccacccgctggcgcgtcgcccgatgcgctttgccgcgccgccgagtaaaaacgtcagcaaagatgtttttcatccggtgttcgacgtcgatcaacagggtcgcccggtgatgcgctatatcgaccagttcgtccagccgaaagacttcgaagaaggcgtgtggttgagcgagctttccgacgccattgaaaccagcaaaggcattctttctgtgcccgttcccgttggcaaattcctgttgattaacaacctgttctggctgcacggtcgcgaccgctttactccgcacccggatctgcgccgtgaactgatgcgccagcgtggctatttcgcttacgcctctaaccactaccagacgcatcagtaagcgcaaaggaattgagcggatgtatgattttgtgattattggcggcggcatcatcggcatgtcgaccgccatgcaactgattgatgtctatccggacgcccgcattgcgttgctggaaaaagagtccgccccggcctgtcaccagacgggccacaacagcggcgtgatccatgccggggtctattacacgcccggcagcctgaaggcgcagttttgcctggcgggaaaccgcgccaccaaagccttttgcgatcaaaacggcattcgctacgacaactgcggcaagatgctggttgccacgtccgatctcgaaatggaacggatgcgcgccttatgggaacgcacagcggcgaacggtatcgagcgcgaatggcttaacgccgacgaactgcgcgagcgcgaaccgaatatcaccgggctcggcggcatttttgtgccgtccagcggcattgtcagctaccgcgacgtgacggcggcgatggcaaaaatcttccagtccagaggcggtgaaattatctataacgccgaagtcagcgggcttaatgagcataaaaacggcgtggtgatacgtacccgtcagggcggcgaatatgaagcatcaacgctgattagctgttccgggctgatggctgaccggctggtgaaaatgctcggactcgaaccgggctttatcatctgcccgttccgtggcgagtatttccgccttgcgccggagcataaccagattgttaaccacctgatttaccccattcccgacccggcaatgccgtttttgggcgttcatctcacccgcatgatcgacggcagcgtgaccgtcgggccaaacgcggtgctggctttcaaacgcgaaggctatcgcaagcgcgacttctcatttagcgacacgctggagattttgggctcgtcggggattcgccgggtgctgcaaaaccatctacgctcaggactgggcgagatgaaaaactcgctgtgcaaaagcggctatctgcggctggtgcaaaagtattgtccccggctttcgttaagcgatctccagccctggcccgccggtgtgcgggcgcaggcggtatcgccggacggcaagctgattgacgattttctgtttgtcaccaccccgcgcacgatccacacctgcaatgcgccctccccggcagcgacatcagcaattcctattggtgcgcatattgtcagcaaggtacaaacgctgttggcaagccagagtaaccccggacgcacgctgcgagcggcacgtagtgtggatgccttacacgccgcatttaatcaataacctttgaaaacaggatgtagcgatgaaacttaacgacagtaacttattccgccagcaggcgttgattaacggggaatggctggacgccaacaatggtgaagccatcgacgtcaccaatccggcgaacggcgacaagctgggtagcgtgccgaaaatgggcgcggatgaaacccgcgccgctatcgacgccgccaaccgcgccctgcccgcctggcgcgcgctcaccgccaaagaacgcgccaccattctgcgcaactggttcaatttgatgatggagcatcaggacgatttagcgcgcctgatgaccctcgaacagggtaaaccactggccgaagcgaaaggcgaaatcagctacgccgcctcctttattgagtggtttgccgaagaaggcaaacgcatttatggcgacaccattcctggtcatcaggccgataaacgcctgattgttatcaagcagccgattggcgtcaccgcggctatcacgccgtggaacttcccggcggcgatgattacccgcaaagccggtccggcgctggcagcaggctgcaccatggtgctgaagcccgccagtcagacgccgttctctgcgctggcgctggcggagctggcgatccgcgcgggcgttccggctggggtatttaacgtggtcaccggttcggcgggcgcggtcggtaacgaactgaccagtaacccgctggtgcgcaaactgtcgtttaccggttcgaccgaaattggccgccagttaatggaacagtgcgcgaaagacatcaagaaagtgtcgctggagctgggcggtaacgcgccgtttatcgtctttgacgatgccgacctcgacaaagccgtggaaggcgcgctggcctcgaaattccgcaacgccgggcaaacctgcgtctgcgccaaccgcctgtatgtgcaggacggcgtgtatgaccgttttgccgaaaaattgcagcaggcagtgagcaaactgcacatcggcgacgggctggataacggcgtcaccatcgggccgctgatcgatgaaaaagcggtagcaaaagtggaagagcatattgccgatgcgctggagaaaggcgcgcgcgtggtttgcggcggtaaagcgcacgaacgcggcggcaacttcttccagccgaccattctggtggacgttccggccaacgccaaagtgtcgaaagaagagacgttcggccccctcgccccgctgttccgctttaaagatgaagctgatgtgattgcgcaagccaatgacaccgagtttggccttgccgcctatttctacgcccgtgatttaagccgcgtcttccgcgtgggcgaagcgctggagtacggcatcgtcggcatcaataccggcattatttccaatgaagtggccccgttcggcggcatcaaagcctcgggtctgggtcgtgaaggttcgaagtatggcatcgaagattacttagaaatcaaatatatgtgcatcggtctttaactggagaatgcgaatgaacagcaataaagagttaatgcagcgccgcagtcaggcgattccccgtggcgttgggcaaattcacccgattttcgctgaccgcgcggaaaactgccgggtgtgggacgttgaaggccgtgagtatcttgatttcgcgggcgggattgcggtgctcaataccgggcacctgcatccgaaggtggtggccgcggtggaagcgcagttgaaaaaactgtcgcacacctgcttccaggtgctggcttacgagccgtatctggagctgtgcgagattatgaatcagaaggtgccgggcgatttcgccaagaaaacgctgctggttacgaccggttccgaagcggtggaaaacgcggtaaaaatcgcccgcgccgccaccaaacgtagcggcaccatcgcttttagcggcgcgtatcacgggcgcacgcattacacgctggcgctgaccggcaaggtgaatccgtactctgcgggcatggggctgatgccgggtcatgtttatcgcgcgctttatccttgcccgctgcacggcataagcgaggatgacgctatcgccagcatccaccggatcttcaaaaatgatgccgcgccggaagatatcgccgccatcgtgattgagccggttcagggcgaaggcggtttctacgcctcgtcgccagcctttatgcagcgtttacgcgctctgtgtgacgagcacgggatcatgctgattgccgatgaagtgcagagcggcgcggggcgtaccggcacgctgtttgcgatggagcagatgggcgttgcgccggatcttaccacctttgcgaaatcgatcgcgggcggcttcccgctggcgggcgtcaccgggcgcgcggaagtaatggatgccgtcgctccaggcggtctgggcggcacctatgcgggtaacccgattgcctgcgtggctgcgctggaagtgttgaaggtgtttgagcaggaaaatctgctgcaaaaagccaacgatctggggcagaagttgaaagacggattgctggcgatagccgaaaaacacccggagatcggcgacgtacgcgggctgggggcgatgatcgccattgagctgtttgaagacggcgatcacaacaagccggacgccaaactcaccgccgagatcgtggctcgcgcccgcgataaaggcctgattcttctctcctgcggcccgtattacaacgtgctgcgcatccttgtaccgctcaccattgaagacgctcagatccgtcagggtctggagatcatcagccagtgttttgatgaggcgaagcagtagcgccgctcctatgccggaggcgacgctgcgcgtcttgtccggcctacggggatccaggtcggataaggcgtttacgccgcatccgacaatctgtacgtgaacaggaagaaatctatgttggccgggtaaggcggagccgctctccggcaaaaagaatcaataacaattatacgcgtgacccggcgcgggaaatgtcggggcgctctcccaagtgacacactttcgagaggattcaggatggggcaatcatcgcaaccacatgagttaggcggcgggctgaagtcacgccacgtcaccatgttgtctattgccggtgttatcggcgcaagtctgtttgtcggttccagcgtcgccatcgccgaagcgggcccggcggtattactggcctatctgttcgccgggctactggtggttatgattatgcggatgttggcggaaatggcggttgccacgcccgataccggttcgttttccacctatgccgataaagccattggtcgctgggcgggctataccatcggctggttgtactggtggttttgggtactggttatcccgctggaagccaacatcgccgccatgatcctgcactcatgggttccaggcattcccatctggttattttccctcgtcattaccctcgccttaactggcagtaacttattaagcgttaaaaactacggcgaatttgagttctggctggcgctgtgcaaagtcatcgctatcctggcctttattttccttggtgcagtcgcaattagcggtttttacccgtatgccgaagtgagcgggatctcaagattgtgggatagcggcggctttatgcccaacggtttcggtgcggtattaagcgcgatgttgatcaccatgttctcgtttatgggcgcagaaattgtcaccattgccgccgcggaatccgacacgccggaaaaacatattgtccgcgccaccaactcggttatctggcgtatttctatcttctatttatgttctatttttgtcgtcgtggcattaattccgtggaatatgcccggactaaaagccgtcggttcttatcgctcggtactggaattgctcaatattccccatgcgaaattaatcatggactgcgtgatattactttccgtaaccagttgcctgaactcggcgctgtataccgcgtcaaggatgctctactccttaagtcgtcgcggtgatgctcccgcggtaatgggtaaaatcaaccgcagtaaaaccccgtacgtggcggtgttactctccaccggcgcggcattcttaacggtggtggtgaactattacgcgcctgcgaaggtatttaaatttctgatcgacagctccggcgctatcgccctgctggtttatttagtcatcgccgtttcacagttgcggatgcgcaaaattctgcgagcagaaggaagcgaaattcgcttgcgaatgtggctttatccgtggctcacctggctagtcatcggctttattacctttgtgttggtagtgatgctattccgtccggcgcaacagttagaagtgatctccaccggcttattagcgatagggattatctgtaccgtgccaattatggctcgctggaaaaagctggtattgtggcaaaaaacacccgttcataatacgcgctgatcatgatcaggagtcacaccatgaccattacgtctctggatggctatcgctggctgaagaacgatattattcgcggtaattttcaaccggatgaaaaattacgaatgagtttgctgacatcgcgttatgcacttggcgttgggccgttacgggaagctctttcgcaactggtggcggaacggctggtcacggtggtgaatcaaaaagggtatcgggtggcgtctatgtcagagcaggagctgctcgatattttcgacgcccgcgccaatatggaagcgatgttagtgagtctggcgattgcccgcggtggcgatgagtgggaggcagacgttctcgcaaaagcgcatctgctgagtaagcttgaggcctgtgacgccagcgagaaaatgcttgatgagtgggatctgcgtcatcaggcgtttcatacggcaattgtggcgggctgtggttctcactatttgctgcaaatgcgtgaacggttgtttgatctggcggcgcgttatcgatttatctggctgcggcgaacggtgctttcggtggaaatgctggaggataaacacgatcagcaccagaccctgactgcggcggtactggcgcgagataccgcgcgcgccagtgagttaatgcgccagcatttactgacgccaattcccattatccagcaggcgatggctggcaattaactactcttccggaatacgcaacacttgccccggataaattttatccgggctttttagcatcggtttattcgcttcgaagattttattgtacagattagcgttaccgtagacctgtttggaaatggcactcagagtgtcgccagacttaacggtataaaactggctggcagtggctggtgtcgccgttttcacctgatcatcgacactggcaataccggaaatattccccaccgcaacaaggattttctccttcgcctcctgactcaggccgtcaccagtgaccgtcgctttgccgtcggcaatttgaatattcactttatcggcatccggtataccggttttgttcagatgctcctgcaccttcttcgcctgatcgtctttatcgtgctgacctgtaaccgcgtcccagagtttttctccggcatctttcacaaaattgaacagacccatagctacctcattcgttaacggaaacactcagaaagtgtagcagaggaacgcggcgcgttaacgccgcggggatgagcacaggtttaatcgcgggtttgcacccagaacgcgtgaatcaaaccggggatatacccaagcagtgtcaacagaatattaataatgaacgcccaaccgaaccctttaccgagcagcacgccgagcggcggcagaatgatggtgatgacgattctccagaaacccatatgtactccctataagaaaattactcattgtttaaaaagagattttatctcttaagcgtagtaattttagcggagcctgccagtttcagcttacgcttttactctcatttacgctgctgaggctggtatatgttgcatttttagtttagagtttacttaatttagaaaatacttaaataaatatgactgaactcgcgcaattacaggccagtgccgaacaggcagcggccttattgaaagcaatgagccaccctaaacgattgctgattctgtgcatgcttagcggttcccccggcaccagcgcgggagagctgacgcgcattaccggactgagtgcctctgcgacatcacagcatctcgctcgtatgcgggacgaagggcttatcgacagccaacgggatgcccaacgcattctatattccattaaaaatgaggcggtaaatgccattatcgccaccctgaaaaatgtctattgtccgtaaggagtcactatggctttgacaaccatttcgccgcatgatgcacaagaattaatcgcacgcggcgcaaagttaatcgatattcgtgatgctgatgaatatcttcgtgaacatattcctgaagcagatctggctccattatccgtgctggaacagtcaggtcttccggctaaattacgtcacgagcaaattatattccactgccaggcaggtaaacgcaccagtaataatgccgataaattagcagcgattgccgcccccgcagaaatctttttactcgaagatgggattgatggctggaaaaaagcaggattgccagtagcggtaaataaatctcaacccttgccgttaatgcgccaggtgcagatcgctgcgggtggtttaatattaatcggcgttgtactgggttataccgtaaatagcggtttcttcttattaagtggctttgttggtgccgggttactgtttgcaggaatcagcggtttttgtggaatggcaaggttgttagataagatgccgtggaaccaacgagcttgagaagcgacgccggacgcgccctagcagcgacatccggcctcagtaattagatcaggaaatcgtcgagagatttaccttctgccagcgcctgagcaattggcttcggtgtacggccctgaccggtccaggttttagtttcaccgttaacatcggtgaatttatatttcgccggacgcggctggcgttttttaccagcgcgtggtgcagcagcagagctattacccaataactcttccgggttaattccgtcagctttcatcagctccagccaggtgctaattttttcctggcgctctgccagttcacgctgctgctgttcttcttcttcacgtctttctttagtgacaaccctgaatttttcgagcatttcttcaagaacgtcaatggagaattcgcgagccatcgcacggagggtgcgaatgttatttaaactttgtaacattacggacataataaagaaaaccttttaacgccaaaacaaaaaaagtatttcgtcgcgtagtgtaagcgatcacttattatatttccacaaaatttaatctatttacagtcctgcgcgagattatttcagctgttattttctgaaactctcagaataatttcaagattatatattagccattttgatgagtaatttagattattggtgaacagagcggcgctctctgctcgctaattccgcaagcctgacaaaatcaaagtgaataaaaatgcaatataacagaataaaagaaaacatccatcactggtgctttctgctgttaatgtacattgtctggcataaaaaatgctgaaaatgacccagctactacatacaccgaattctctacgcttatagcgttacctcacccccaaactttcattagtgatattaaaggtaaggccatatctaattgatttaattaaaaataaatcatatcggcatgtaaaaatccacaatgtacaaaaaacgagccgttacggaatattttatctacaaaaactgactaaataaaaatttttcactaattgattagtcatagccagcgatatacgctatgcgaaaatgcagatggcaatgagatccactgctttcatctccattaacatcccattacgcttttattaaggagcattagcatgttctcaccgcagtcacgcttgcgtcatgcagttgcagatacgttcgcgatggttgtttactgttctgtcgtgaacatgtgtattgaagttttcctctccggaatgagcttcgaacagtctttttattccagattggtagcgattccggtgaacatcttaattgcatggccatacggtatgtaccgtgatctgtttatgcgcgcggcacgcaaagttagcccgtcgggctggataaaaaatctggcggatatcctggcttatgtgacgttccagtcaccggtgtatgtggcgatcttgttagtggtgggcgcagactggcatcagattatggcggcggtcagttcaaacatcgttgtttcgatgttgatgggggcggtttatggctacttcctcgattattgccgccgactgtttaaagtcagccgttaccagcaggtaaaagcctgactcttcttttcgcgactggcatcgccagtcgcgtctttaactggcttcgccaaataaaccattcaaataacgttcaagcgcaacacgcgaactaaagccatgcgggataccgtaatgctcgtgtcgctcgcctgctaaatagagcggaaattgctggtaatgatcgcaagttttaatatcggaagcgggttcagccagtgtcgaactgcgttcttttaatgttggatgaattaccagagcggtacgtcccattcgcgcttcgcgattaacatagacataattttccccacggcggtaaccatacgctttctgggttaccacatcgacagtaaaaccgactttttcaagtacgcgcgccacctcgtctggtcgtaaatacatatttgatcctcgttattatcaaccgcgggcctaccttacctgattgcgcattcacaacgctttcagaaaagtccataaagccgcgatgaacctcagttaagaaaattatggtctacactgaaaattacatcgaattctaatgggggatcatatgtttaaccgaccgaaccgcaacgacgttgatgatggcgtgcaggatatccagaatgatgtcaatcaattagctgacagcctcgaatctgtattgaagtcctggggcagcgacgccaaaggggaagctgaagccgcacgcagtaaagctcaggcattgctgaaagaaaccagggcgcgaatgcatggtcgtactcgcgtccagcaagccgcgcgcgatgccgttggctgcgcggattcttttgttcgtgaaagaccctggtgtagcgtgggtacagcagctgcggtaggtatttttatcggcgcactgttaagcatgcgcaaatcgtagtgcaaaaatgataataaatacgcgtctttgaccccgaagcctgtcttcggggtttctttttgcctggtgaatcacaaaaatccccctaccccgtcacgctcatatccagggtaatttcgaccactatttgctatatattgtgtggttgaatcttttttcaactacatctagtatctctgtatcaacagagagacaacccgacgcgtatcatcgcgccgtatcttcattttaaacggaaatacgaatcatgcgcattactatttacactcgtaacgattgcgttcagtgccacgccaccaaacgggcgatggaaaaccggggctttgattttgaaatgattaatgtcgatcgcgttcctgaagcggcagaagcgttgcgtgctcagggctttcgtcagttgccggtagtgattgctggcgatcttagctggtctggtttccgtccggacatgattaaccgtctgcatccagcgccacacgcggccagtgcatgagccagctcgtctacttctccagcagctccgaaaacacgcagcgttttatcgaacgtttaggtctgcccgcggtgcgcatcccgctcaatgagcgggaacggattcaggtagacgagccttacatcctgatcgtgccctcttacggcggcggcggtacggctggcgcggtgccacgacaggtaattcgctttttaaacgacgagcacaaccgggcgttgcttcgcggcgttattgcttctggtaatcgcaactttggtgaggcgtatggccgcgccggagatgtgattgcccggaaatgcggcgtgccgtggctgtaccgttttgaactcatgggtacgcaaagcgatatcgaaaacgttcgtaaaggagtaaccgaattttggcaacgacaaccgcagaatgcctgacgcaggaaacgatggattaccacgcgctgaatgcgatgcttaacctctacgatagcgcaggtcgcattcagttcgataaagaccgccaggccgttgacgcctttattgcgacgcatgtgcgtccgaacagtgtgaccttcagtagccagcagcagcgcctgaactggctggtcaacgaaggttactatgatgaaagcgttcttaatcgctactctcgcgactttgtcattacgctgtttacccacgcacacaccagcggttttcgtttccagacattcctcggggcatggaagttttacaccagctatacgttgaagacattcgacggtaaacgttatctggaagattttgccgatcgagtaacgatggtggcgctgacgctggcacaaggcgatgagacgctggcgttgcaactgaccgatgaaatgctgtcaggacgctttcagccagccacgccaacattcctcaactgcggtaagcagcagcgcggcgaactggtttcctgttttttgctgcgtattgaagacaatatggagtcgattggtcgggcggtaaattccgcactgcagctgtcgaaacgcggcggcggcgtagcatttttgctgtcgaatctgcgagaagcgggcgcgccaattaaacgtattgaaaatcaatcttctggcgtaattccggtgatgaaaatgctggaagacgcattttcctatgccaaccaactcggcgctcgtcagggggctggtgcagtctatttacatgctcatcatcccgatattctgcgttttctcgacacgaaacgggaaaatgccgacgaaaaaatccgcattaaaacactgtcgcttggcgtggtgatcccggatatcactttccatctggcaaaagagaatgcgcagatggcgctgttttcgccttatgacgtagagcgagtttatggcaagccgtttgccgatgtggccatcagccaacactatgacgaactggttgccgatgaacgcattcgcaaaaaatacctcaacgcccgtgatttcttccagcgactggcagaaatccagtttgagtccggctatccctacatcatgtatgaagacacggtaaaccgtgctaaccctatcgccgggcgcataaatatgagtaatctctgctcagaaattttgcaggttaacagcgcctcagagtatgacgagaatctcgactatacccgcacaggccatgatatttcctgcaatttaggttcgttgaatattgcgcacaccatggattcccccgattttgcccgcacggtagagactgccgtgcgcggtttaacggcagtatcagatatgagtcatatccgcagcgtgccgtccatcgaagccggaaatgccgcctcgcacgccatcggactggggcagatgaatttacacggctatctggcgcgagaaggcatcgcttatggttcgccggaagcactggatttcaccaatctctatttctatgccatcacctggcatgcactgcgtacctcgatgttgctggcacgcgaacgcggtgaaaccttcgccgggttcaaacagtcacgctatgccagtggtgaatattttagccaatatctgcaagggaactggcagccgaaaacggcgaaagttggcgaactgtttacccgtagcggtattacgttacctacccgtgagatgtgggcgcagctgcgcgacgacgtgatgcgctacggcatatacaaccagaatcttcaggcggtgccgccaaccggttctatctcttatatcaaccatgctacgtcgagtattcatccgattgtggcgaaagtagagatacgcaaagagggcaaaacaggacgcgtttactaccctgccccgtttatgactaacgagaatctggcgctgtatcaggacgcttacgaaattggcgcagaaaagatcatcgacacctacgcggaagcgactcgccatgtcgatcaggggctgtcgctgacgctttttttccccgataccgccaccactcgcgatatcaacaaagcgcagatttacgcctggcgcaagggtatcaaaacgctctattacatccgcctgcgtcagatggcgctggaaggcactgaaattgaaggctgcgtctcctgtgcactttaaggaatatctatgaaactctcacgtatcagcgccatcaactggaacaagatatctgacgataaagatctggaggtgtggaatcgcctgaccagcaatttctggctaccagaaaaggtgccgctgtcgaacgatattcctgcctggcagacattaactgtcgtagaacaacaactgacgatgcgcgtttttactggcctgacgctgctcgacacgctgcaaaatgttatcggcgcgccttctctgatgcccgatgcactcacgcctcatgaagaagcggtattatcgaatatcagctttatggaagcggttcatgcccgctcttacagttcgattttctcgacgctatgccagaccaaagatgtcgatgccgcctacgcctggagtgaagaaaacgcaccgttgcagcgaaaagctcagattattcagcaacattatcgcggtgatgatccgctgaaaaagaaaatcgccagtgtgtttcttgaatcttttttgttctattccggtttctggctgccgatgtatttttccagccgcggaaagctgaccaataccgcggacctgatccgtctgattatccgcgatgaagcagtccacggttactacataggctataaatatcagaaaaacatggaaaagatatctctgggacaacgtgaagagttgaagagtttcgccttcgatttgttgctggaactctacgacaacgagttgcaatacaccgatgagctgtacgccgaaaccccgtgggctgacgatgtgaaagcgtttctctgttacaacgccaataaggctttgatgaatctgggctacgaaccgttatttcccgcagaaatggcggaagtgaatccggcaatcctcgccgcgctttcgccgaatgccgatgaaaatcacgatttcttttccggttcaggctcctcttatgtgatggggaaagcggttgaaacagaagatgaagactggaatttctgagggtgttattttcaaaaatatcactacccgcagcagggaaataattcccgccaaatagctttttatcacgcaaataatttgtggtgatctacactgatactctgttgcattattcgcctgaaaccacaatattcaggcgttttttcgctatctttgacaaaaaatatcaactttctcgatttgctctcagcccttatatcacgggaaattccggcgatttgctcgcatcaatattcatgccacatttgccatcaggggttgcctcagattctcagtatgttagggtagaaaaaagtgactatttccattgggtaatatatcgacatagacaaataaaggaatctttctattgcatggcaattaaattagaaattaaaaatctttataaaatatttggcgagcatccacagcgagcgttcaaatatatcgaacaaggactttcaaaagaacaaattctggaaaaaactgggctatcgcttggcgtaaaagacgccagtctggccattgaagaaggcgagatatttgtcatcatgggattatccggctcgggtaaatccacaatggtacgccttctcaatcgcctgattgaacccacccgcgggcaagtgctgattgatggtgtggatattgccaaaatatccgacgccgaactccgtgaggtgcgcagaaaaaagattgcgatggtcttccagtcctttgccttaatgccgcatatgaccgtgctggacaatactgcgttcggtatggaattggccggaattaatgccgaagaacgccgggaaaaagcccttgatgcactgcgtcaggtcgggctggaaaattatgcccacagctacccggatgaactctctggcgggatgcgtcaacgtgtgggattagcccgcgcgttagcgattaatccggatatattattaatggacgaagccttctcggcgctcgatccattaattcgcaccgagatgcaggatgagctggtaaaattacaggcgaaacatcagcgcaccattgtctttatttcccacgatcttgatgaagccatgcgtattggcgaccgaattgccattatgcaaaatggtgaagtggtacaggtcggcacaccggatgaaattctcaataatccggcgaatgattatgtccgtaccttcttccgtggcgttgatattagtcaggtattcagtgcgaaagatattgcccgccggacaccgaatggcttaattcgtaaaacccctggcttcggcccacgttcggcactgaaattattgcaggatgaagatcgcgaatatggctacgttatcgaacgcggtaataagtttgtcggcgcagtctccatcgattcgcttaaaaccgcgttaacgcagcagcaaggtcttgatgcggcgctgattgatgcgccgttagcagtcgatgcacaaacgcctcttagcgagttgctctctcatgtcggacaggcaccctgtgcggtgcccgtggtcgacgaggaccaacagtatgtcggcatcatttcgaaaggaatgctgctgcgcgctttagatcgtgagggggtaaataatggctgatcaaaataatccgtgggataccacgccagcggcggacagtgccgcgcaatccgcagacgcctggggtacaccgacgactgcaccgactgacggcggtggtgctgactggctgaccagtacgcctgcgccaaacgtcgagcattttaatattctcgatccgttccataaaacgctgatcccgctcgacagttgggtcactgaagggatcgactgggtcgttacccatttccgtcccgtcttccagggcgtgcgcgttccggttgattatatcctcaacggtttccagcaattgctgctgggtatgcccgcaccggtggcgattatcgttttcgctctcatcgcctggcagatttccggggtcggaatgggtgtggcgacgctggtttcgctgattgccatcggcgcaatcggtgcctggtcgcaggcaatggtgactctggcgctggtgttaaccgccctgctgttctgtatcgtcatcggtttgccgttggggatatggctggcgagaagtccgcgagcggcgaaaattattcgtccactgcttgatgccatgcagaccacgccagcgtttgtttatctggtgccaatcgtcatgctatttggtatcggtaacgtgccgggcgtggtggtgacgatcatctttgctctgccgccgattatccgtctgaccattctggggattaaccaggttccggcggatctgattgaagcctcgcgctcattcggtgccagcccgcgccagatgctgttcaaagttcagttaccgctggcgatgccgaccattatggcgggcgttaaccagacgctgatgctggccctttctatggtggtcatcgcctcgatgattgccgtcggcgggttgggtcagatggtacttcgcggtatcggtcgtctggatatggggcttgccaccgttggcggcgtcgggattgtgatcctcgccattatcctcgatcgtctgacgcaggccgttgggcgcgactcacgcagtcgcggcaaccgtcgctggtacaccactggccctgttggtctgctgacccgcccattcattaagtaactctgcacttgcccggtgacgccgggcattatcaccctgccaaaaaaaggaataacaatgcgacatagcgtactttttgcgacagcgtttgccacgcttatctctacacaaacttttgctgccgatctgccgggcaaaggcattactgttaatccagttcagagcaccatcactgaagaaaccttccagacgctgctggtcagtcgtgcgctggagaaattaggttataccgtcaacaaacccagcgaagtagattacaacgttggctacacctcgcttgcttccggcgatgcaaccttcaccgccgtgaactggacgccactgcatgacaacatgtacgaagctgccggtggcgataagaaattttatcgtgaaggggtatttgttaacggcgcggcacagggttacctgatcgataagaaaaccgccgaccagtacaaaatcaccaacatcgcacaactgaaagatccgaagatcgccaaactgttcgataccaacggcgacggaaaagcggatttaaccggttgtaaccctggctggggctgcgaaggtgcgatcaaccaccagcttgccgcgtatgaactgaccaacaccgtgacgcataatcaggggaactacgcagcgatgatggccgacaccatcagtcgctacaaagagggcaaaccggtgttttattacacctggacgccgtactgggtgagtaacgaactgaagccgggcaaagatgtcgtctggttgcaggtgccgttctccgcactgccgggcgataaaaacgccgataccaaactgccgaatggtgcgaattatggcttcccggtcagcaccatgcatatcgttgccaacaaagcctgggccgagaaaaacccggcagcagcgaaactgtttgccattatgcagttgccagtggcagatattaacgcccagaacgccattatgcatgacggcaaagcctcagaaggcgatattcagggacacgttgatggttggatcaaagcccaccagcagcagttcgatggctgggtgaatgaggcgctggcagcgcagaagtaatttttattcgggcggataaggcgtttttgccgcatccgccgttctgtgcacaatgcctgatgcgacgctggcgcgtcttatcatgcctacaaaccacatcgcacatttcaacaatctatctttcatcccatattcatcaacatccgctattattgatttccagcttaatcatcacctgatgaacaaaaataatgactaaacctaatcatgagcttagcccggcgctgatcgtgctgatgtctatcgccaccggtctggcggtagccagtaactattacgcccagccattgctcgacaccatcgcgcgtaacttttccctttccgccagttcggcaggctttattgttaccgccgcgcagttgggctatgccgcaggtctactgtttcttgttcccctcggtgatatgtttgaacgccgccgcctgattgtctcgatgaccttactggcggcatgttgattaccgccagcagtcagtcgctggcgatgatgatcctcggtacggcattaaccggtttattctcagtcgtggcacaaattctggttccgctggcagcgacgctggcttcaccggataaacgcggcaaagtggttggcactattatgagcggtctgctgttggggatcttgctggcacggacagttgccggattgctggcgaatctcggcggctggcgcaccgtcttttgggttgcttcggtgttaatggcactgatggcgctggcattatggcgtggtctgccacaaatgaaatcagaaacccacctcaactacccacagttgttgggttccgttttcagtatgtttatcagcgataaaattctgcgtacccgcgcgttgctgggctgcctgacctttgccaatttcagcattctctggacctcaatggcctttttgcttgccgctccaccttttaactacagcgatggtgtcattggtctgtttggacttgcgggagctgccggagcgttgggcgctcgtccggcgggcggttttgccgataagggcaaatcgcaccacaccacaactttcggtctgctgctgctattactttcatggctggcgatctggtttggtcacacttccgtactggcgttgattatcggaatcctggtgctggatctcaccgtgcagggcgtgcatatcactaaccagacggtaatttatcggatacatcctgatgcgcgcaatcgcctgaccgcaggttacatgactagctactttattggcggtgccgccggttcgctaatttcagcctcagcctggcaacatggcggttgggctggcgtttgtctggctggcgcgacgattgccctggttaacttactggtctggtggcgaggttttcatcgtcaggaagccgcaaattaagcaatcagcaaccgttttcgtggctttacacttataagggtgttaagaagcccatcagtctgataaggttaagatattcattcagtctatttataatattaacaatcgttaagcgtacactctatggaaagccctactccacagcctgctcctggttcggcgaccttcatggaaggatgcaaagacagtttaccgattgttattagttatattccggtggcctttgcgttcggtctgaatgcgacccgtctgggattctctcctctcgaaagcgtttttttctcctgcatcatttatgcaggcgcgagccagttcgtcattaccgcgatgctggcagccgggagtagtttgtggattgctgcactgaccgtcatggcaatggatgttcgccatgtgttgtatggcccgtcactgcgtagccgtattattcagcgtctgcaaaaatcgaaaaccgccctgtgggcgtttggcctgacggatgaggtttttgccgccgcaaccgcaaaactggtacgcaataatcgccgctggagcgagaactggatgatcggcattgccttcagttcatggtcatcgtgggtatttggtacggtaataggggcattctccggcagcggcttgctgcaaggttatcccgccgttgaagctgcattaggttttatgcttccggcactctttatgagtttcctgctcgcctctttccagcgcaaacaatctctttgcgttaccgcagcgttagttggtgcccttgcaggcgtaacgctattttctattcccgtcgccattctggcaggcattgtctgtggctgcctcactgcgttaatccaggcattctggcaaggagcgcccgatgagctatgaggttctgctgcttgggttactagttggcgtggcgaattattgcttccgctatttgccgctgcgcctgcgtgtgggtaatgcccgcccaaccaaacgtggcgcggtaggtattttgctcgacaccattggcatcgcctcgatatgcgctctgctggttgtctctaccgcaccagaagtgatgcacgatacacgccgtttcgtgcccacgctggtcggcttcgcggtactgggtgccagtttctataaaacacgcagcattatcatcccaacactgcttagtgcgctggcctatgggctcgcctggaaagtgatggcgattatataacccacaagaatcatttttctaaaacaatacatttactttatttgtcactgtcgttactatatcggctgaaattaatgaggtcatacccaaatggatagttcgtttacgcccattgaacaaatgctaaaatttcgcgccagccgccacgaagattttccttatcaggagatccttctgactcgtctttgcatgcacatgcaaagcaagctgctggagaaccgcaataaaatgctgaaggctcaggggattaacgagacgttgtttatggcgttgattacgctggagtctcaggaaaaccacagtattcagccttctgaattaagttgtgctcttggatcatcccgtaccaacgcgacgcgtattgccgatgaactggaaaaacgcggttggatcgaacgtcgtgaaagcgataacgatcgccgctgcctgcatctgcaattaacggaaaaaggtcacgagtttttgcgcgaggttttaccaccgcagcataactgcctgcatcaactctggtccgcgctcagcacaacagaaaaagatcagctcgagcaaatcacccgcaaattgctctcccgtctcgaccagatggaacaagacggtgtggttctcgaagcgatgagctaacgcgtcatctcgctcaaaaatccagatttataaaagaaaaaatgactggccagcatcgcaacatgctggcctttttggcaagcaggtcggctcagccgatgagttaagaagatcgtggagaacaatatgagcgcaaatgcggagactcaaaccccgcagcaaccggtaaagaagagcggcaaacgtaagcgtctgctcctccttctcaccttgctctttataattattgccgtagcgatagggatttattggtttttggtactgcgtcacttcgaagaaaccgatgacgcatacgtggcagggaatcaaattcaaattatgtctcaggtgtctggcagcgtgacgaaagtctgggccgataacaccgattttgtaaaagaaggcgacgtgctggtcactctcgacccgacagatgctcgccaggcgtttgaaaaagccaaaactgcactggcttccagcgttcgccaaacccaccagctgatgattaacagcaagcagttgcaggcgaatattgaggtgcagaaaatcgccctcgcgaaagcacaaagcgactacaaccgccgtgtgccgctgggcaatgccaacctgattggtcgcgaagagctgcaacacgcccgcgacgccgtcaccagtgcccaggcgcaactggacgtcgcgattcaacaatacaatgccaatcaggcgatgattctggggactaaactggaagatcagccagccgtgcaacaggctgccaccgaagtacgtaacgcctggctggcgctggagcgtactcgtattatcagtccgatgaccggttatgtctcccgccgcgcggtacagcctggggcgcaaattagcccaacgacgccgctgatggcggtcgttccagccaccaatatgtgggtggatgccaactttaaagagacgcagattgccaatatgcgtatcggtcagccggtcactatcaccacggatatttacggcgatgatgtgaaatacaccggtaaagtggttggtctggatatgggcacaggtagcgcgttctcactgcttccagcgcaaaatgcgaccggtaactggatcaaagtcgttcagcgtctgcctgtgcgtatcgaactggaccagaaacagctggagcaatatccgctgcgtatcggtttgtccacgctggtgagcgtcaataccactaaccgtgacggtcaggtactggcaaataaagtacgttccactccggtagcggtaagcaccgcgcgtgaaatcagcctggcacctgtcaataaactgatcgacgatatcgtaaaagctaacgctggctaatccagaggtgcgtgtgatgcaacagcaaaaaccgctggaaggcgcgcaactggtcattatgacgattgcgctgtcactggcgacattcatgcaggtgctggactccaccattgctaacgtggcgatccccactatcgccgggaatctgggctcatcgctcagccagggaacgtgggtaatcacttctttcggggtggcgaatgccatctcgatcccgcttaccggctggctggcaaagcgcgtcggggaagtgaaactgttcctttggtccaccatcgcctttgctattgcgtcgtgggcgtgtggtgtctccagcagcctgaatatgctgatcttcttccgcgtgattcaggggattgtcgccgggccgttgatcccgctttcgcaaagtctattgctgaataactacccgccagccaaacgctcgatcgcgctggcgttgtggtcgatgacggtgattgtcgcgccaatttgcggcccgatcctcggcggttatatcagcgataattaccactggggctggatattcttcatcaacgtgccgattggcgtggcggtggtgttgatgacactgcaaactctgcgcggacgtgaaacccgcaccgaacggcggcggattgatgccgtggggctggcactgctggttattggtatcggcagcctgcagattatgctcgaccgcggtaaagagctggactggttttcatcacaggaaattatcatccttaccgtggtggcggtggtggctatctgcttcctgattgtctgggagctgaccgacgataacccgatagtcgatctgtcgttgtttaagtcgcgcaacttcaccatcggctgcttgtgtatcagcctcgcgtatatgctctacttcggcgctattgttctgctgccgcagttgttgcaggaggtctacggttacacggcgacctgggcaggtttggcctctgcgccggtagggattattccggtgatcctgtcgccgattatcggccgcttcgcgcataaactggatatgcggcggctggtaaccttcagctttattatgtatgccgtctgcttctactggcgtgcctatacctttgaaccaggtatggattttggcgcgtcggcctggccgcagtttatccaggggtttgcggtggcctgcttctttatgccgctgaccaccattacgctgtctggtttgccaccggaacgactggcggcggcatcgagcctctctaactttacgcgaacgctggcggggtctatcggcacgtcgataaccacgaccatgtggaccaaccgcgagtcgatgcaccatgcgcagttgactgagtcggtaaacccgttcaacccgaatgcccaggcgatgtacagtcaactggaagggcttgggatgacgcaacagcaggcatcaggctggattgcccagcagatcaccaatcaggggctgattatttccgccaatgagatcttctggatgtcagccgggatattcctcgtcctgctggggctggtgtggtttgctaaaccgccatttggcgcaggtggcggcggaggcggtgcgcactaagtacaactaagccagttcatttgaactggcttttttcaattaattgtgaagatagtttactgactagatgtgcagttcctgcaacttctctttcggcagtgccagttcttcgttgctgttgatgcgtacgtcacgttccagaatgctacgcgcaatatcctgcgcttcctgcaacgagtgcatctggtaagtgccacactggtagacgttcagttccgggatctgattctgatcctgcactttcagcacgtcttccattgccgctttccaggcatcagcaacacgctgctcatctggcgtaccaatcagactcatataaaaaccggtgcggcagcccattggcgagatatcgataatctctacaccattaccgttaagatggttacgcataaaaccagcaaacaggtgctccagggtatggatccctctttctggcatcacttctttgttcggcacgcagaagcgcagatcgaacacggtgattgcgtcgccatgcggggtgttcattgttttcgccacccgaactgcaggcgcttccatccgggtatgatcgactgtgaagctatctaacaacggcatttagccacctccggtaatttttttaaaaattttctgaactctttcttcccaggcgagtctgagtatatgaaagacgcgcatttgttatcatcatccctgaattcagagatgaaattttggccactcacgagtggcctttttcttttctgtcaggcgtgtttttccagccacaccgcaaacggttcggtatcagcggcttccatttcctgctgacggcgttcagacgcctcgcgctcggctacaaaatcctcttcgcgcagaatttccagcggctcttcacgcagcagattacggtaggcttctgcaaatgctttgcctgttccgccaataccagtatcaatcatagaccttaagatacgggcagagaaagtcagatcgggattatcgaagcaggcaaccagttcatcacacactttctgatacgcttcgccgccgttaatactatccagcgtttgcgcgacgcgtttcagatcgcggaacagatctttacccacctgcggtaacgggaactgtgcggtttcgcagccgatacccagcgtcagacccggtttgcgaccttcgaggatcacccggttccagttaacgcgtgtacaggcaagttcgctactgctcatttccggtgcatcagccagcgcacaccagaccataaacaggtcgaggaatcgcacctgctgttcatctacaccaatcggcgagaacgggttgatgtccagcgaacgcacttcaatatattcaatgccgccacgtaacagcgcatcagaaggcgactcgccgctgcgggtaacgcgttttggacgaatcggcgcgtacagttcgttttcaatctgcaacacgttgctgttgatttgcagcctcttaccgtctttctcaataccaatcttcgcgtactcttccgatggcgttttgattgcctgtttaaggcccgctacgtactcgtaaagatcgttgaaggtaataccaagattgctttgcgatttattggtatagccgagatcgctcaaacgaagagaggtcgcatacggcaggtaatacataccgcactcggttttctcaaacggcagcgacgttggttttccttgcaggaaagaagaacaaatcgccggagatgcaccaaacagataaggaatgacccaaccgaaacgatagtaattgcggataacgcggaaatagcccgcagaaattttctctttggcatcagcgcccgagatatcaccgcacttcgcttgccagaatgccattggcaaagagaaattgtagtgcacgccggaaatggtttgcatcagcgcgccgtagcgatttttcagcccttcacgatacagcgttttaaagcgtccggtgttagaagtgccgtactgtgccagttcgatgtcctgaccttctgcgatgtagcatggcatacttaacggccacatccgctcatcgcccatattgcgcgccgtataacgatgcagatcgcgcataaaggtcagcatatgttcaatatcaccatccactggtgtaatgaattccagcaatgcttccgcaaaatcggtagtaatccatttgtgcgtcagtgcggaacctaatgcttcaggatgacctgttgttgccagtgtgccatcagcattaacacgcaaagtttcgcgctccagcccacgctgtatcccctttaacgcctgaggatgtttttccagccaggccagcgcctgtgatacgtccgggatcaaattgacctcccgcctgtcaaaatcgttttaattagcataactgtaatggtgaccatatgtgcaggcctacaattagtgccaccacatcatgccctgaacggtcgctgctgcaactgcaacatagcgtaacgctttaccaaggcacaaaaaaaagattaccggtccccacgagatgcgcatccatcccgctaacagacacagtaaatcgccaaccacgggcatccagcttaataatagcgtgactgcaccatagcgtttcagccagccggtagctttctcttgccagcgcgatgttttacgcaatggaaagaaacgcccaaggataacgttagttaaccctccaaggctattacccattgttgctgttaaaactaaaacccagggatgactgatcccggaaagcaacattgccaccagcacgacttcggagttgccgggtaatagtgtagcgctgagaaaactactggcaaacaacgagaaaagcgataacgcttcactcacagcaagcgaacatccacggcgtccatgcctgctgcacgggccgcctgaataccgaaatcggcatcttcaaagaccacacactgcgtcggttgcacgcccatacgctgcgcgcacaacaaaaatgtgtctggcgcgggtttatggtgtttgacgtgatcggcagcgacgacggcgtcaaaataatggcgtaatcccaggtgcgccagcaatgcctcagcgatggcgctttcactccccgttcctacagccattgggcgacgaccatgccaacttttcaccacatcaacaagaggaagcggttcgacgctatccagcagcatacttcttactgcttctgttttttcacgcgctaacgcatgcgggtcgagatcggcctgattcagctcaataattgcctgagcaatacgccaggtgggcgatccattaagcgcaatcatcgcctgaatatcgtactgaagaccgtagtgccctaatacttcgcgccacgctttacggtgcgtaggctccgtatccaggattgtgccatccatatcaaaaattaaacctgcataacgctcgtacatggtcttctcgcaagtcgaaaaatatgacgctactttagcgtaattgcttgattttgtcgctgatggcgaaggagaagaaaattcaggaaatggataaaggagttatttagaaatgagatatttttgaaggaaattttttggagaagatggtgcatccgggaggatgactcactgacgttcgcccttcgggccgttgctggcgcaacgttatccttcctggtgcctgcggttaataccgctatctcttcgataccttcattgctgaaggttacggagaatatggtgcatccgggaggattcgaacctccgaccgctcggttcgtagccgagtactctatccagctgagctacggatgcatcgggaaaacttattctactgctgatattgataccgctactaaagccatatcaattaagagatggtgcatccgggaggattactcgccttgcggctcgcccttcgggccgttgctaaagcaacgttatcatccctagtgcctgcggttaattccgctacctcttcgataccttcattgctgaagatttcggagaatatggtgcatccgggaggattcgaacctccgaccgctcggttcgtagccgagtactctatccagctgagctacggatgcatcgggaaatttattttactgctgatattgataccgctactaaagccatatcaagtaagagatggtgcatccgggaggattcgaacctccgaccgctcggttcgtagccgagtactctatccagctgagctacggatgcatcgggaaacttactttactgcagattttttgataccgctactaaagccgtatcaagtaagagatggtgcatccgggaggattactcgccttgcggctcgcccttcgggccgttgctaaagcaacgttatcctccctggtgcctgcggttattaccgccacctcttccataccttcatcgctgaaagtacgtagaatatggtgcatccgggaggattcgaacctccgaccgctcggttcgtagccgagtactctatccagctgagctacggatgcaaatggcggtgaggcggggattcgaaccccggatgcagcttttgaccgcatactcccttagcaggggagcgccttcagcctctcggccacctcaccacacgcctcttacgagtgcttcgaagaacttgtttatcgctcatcgtcgctgcgtggcgcacatattactttctgagacttataagtcaaacaatttttcctacacttttatcgtttgcacacttcacgttcaattagtctgtaaaaacgtcaaaaagagtgttttatcaacagaagaatggaggtctgacagatagtagtaatgcaaaaaaatggagacttaagttgaatgaacgggagtaaagcgaaaagactatagagtgaaggagaaattttgagggtgcgtctcaccgataaagatgagacgcggaaagattagtaactggactgctgggatttttcagcctggatacgctggtagatctcttcacggtgaacagaaacttccttcggggcatttacgccaatacgtacctggttgccctttacccctaaaactgtcacggtgacctcatccccaatcatgagggtctcaccaactcgacgagtcagaatcagcattctttgctccttgaaagattaaaagagtcgggtctctctgtatcccggcattatccatcatataacgccaaaaagtaagcaatgacaaacacattacatctaagcagtcatggcattacattctgttaaacctaagtttagccgatatacacaacttcaacctgactttatcgttgtcgatagcgttaatgcgaatgccgtgaagcgagtccacggcattgcctgacgcttatattattgcaatttcgcgctgacccagcctttcacactggctaacgctgcaggtaaggccgcagcatccgtaccaccggcttgcgccatgtcaggacgtccaccacccttgccgcccacctgctgagcgaccataccaatcagttcccctgctttcacacgatctgtgacgtccttagatacgcctgcaatcagagaaaccttaccttcgactaccgttgccagcacgataattgtcgaccccagctgattttttaaatcgtcaaccatggtacgcaacattttcggctcaacaccgctaagctcgctaaccaacagcttaacaccattaacatcaattgccttactggaaagatttgcgctctcctgtgcggcagcttgttctttaagctgttgtaactctttttccagctgacgcgtacgttccagtactgagcgcactttatcagccagattattgctatcgcctttcagcagatgcgcgacttcgcttaagcgatcgctgtctgcatgaacggtggcgatagcaccttctccggttaccgcttcgatacgacgaacgcctgcagcagtacccgattcagagatgatgcggaacagaccaatatcaccagtgcggctggcgtgagtaccgccacacaactcggtagagaaatcgcccatgctcagcacgcgtacgcgctcatcatacttctcgccgaacagcgccatcgcacctttcgctttcgccgcttcgagatccatgatgttggtttcgatcggcaaattgcgacgaatctgtgtgttcaccaggtcttcgaccgcacgaatctcttctggtttcatcgcttcgttgtgtgagaagtcgaagcgcagcaccttgtcgttaaccagtgaacctttctgcgatacatgagtacccagaacctggcgcagcgcagcgtgcatcaggtgcgttgcggagtgattcagacgaatacgggcgcgacgagcctcatcaacatcagcctgcaccgcgtcgcccactttcagagaacccgcagcaagtttaccgatgtgaccaatcgcctggccgtatttctgcgtatcttccaccgcaaaggagaagttagcgcctttcagttcgcctttatcgccaacctgaccgccggattccgcatagaatggcgtttgatccagcacgaccacagcttcctggcctgcattgatggcatcaaccgctttaccatcaacaaacagcgcagtcactttgccgttcagttccagatggtcatagcctttaaattcagatgcactgtcaacacggatcattgcgttgtaatcggcaccaaagccgctggcttcgcgcgcgcgacgacgctgctcttccattgcagcttcaaaaccagcttcgtcaactttgatgttgcgctcacgacaaacatcagccgtcaggtcaaccgggaagccataggtgtcgtacagacggaaagcagtttcaccatccagcgtatcaccagaaagttttgccagctcttcatccagcaacgccagaccgcgctccagagtacgagcaaactgctcttcttcagtcttcagcacctgctcaacctgcgcctgctggcgtttcaggtcttcacccgcagagcccataacgtcgatcagcggaccaaccagtttgtagaagaaggtttctttcgcgccgagcatattaccgtgacgcactgcgcgacgaatgatacgacgcagtacataaccacggttttcattggacggcattacgccatccgcgatcaggaacgcacaagaacgaatgtggtcagcgattacgcgcagcgatttattgctcagatcggttgcgccagtgactttcgctaccgcctggatcagcgtgcggaacaggtcgatgtcatagttagagttaacgtgttgcagcaccgcagcaatacgctccagacccataccggtatctacagacggcttcggcagcggttccatcgtgccatcggcctggcggttgaactgcatgaagacgatgttccagatctcaatgtagcggtcgccgtcttcttccgggcttcccggagggcccccccaaatgtggtcgccgtgatcgtagaagatttcggtgcacgggccgcacggaccagtgtcacccatctgccagaagttgtcagatgcgtatggcgcacctttgttatcgccgatgcgaataatacgttcgcgcgggatccctacttctttttcccagatttcgtaggcttcgtcgtcgctttcatagacggtaacccacagacgctctttcggcagggcaaaccatttttcgctggtcagcagttcccatgcaaactgaatggcatcgtgtttgaaatagtcgccgaagctgaagttgcccagcatttcgaagaaggtatggtgacgcgcggtgtaaccgacgttttccaggtcgttgtgtttaccacccgcacgcacgcagcgttgggaagtggtagcgcgggaataattacgcttgtcgagcccaaggaacacatccttgaactggttcatcccggcgttggtaaacaacaaagttgggtcgttatggggtaccagggagctgctggcaactacctgatgtcccttactatggaaaaagtcgagaaacgcctgacggatctcagcggtgctcttgctcataattatcctgaaatcaagctaacgaaatatcgccaccagctccagcgtgtcttaaccgccgggctggtaactgaaaagtgggaataagataagttttcttgactgggaagtaaaataccgtatgcgttcagtcggcaaaatttcgccaaatctcctggatatcttccatcagatagccacgatagagcagaaaacgctggatcttaactttttctgaaaagacagttggcaaaggttcgccatattttcgcgtcgcctgatcgcgcgccagtgcgcaccagtcgatgtcacattcacgcatcgctttttctgtcgcttcgcgggaaatacctttctgattcagttcctggcgaatacgcgcaggtccataacctttgcggctacggctggcgataaagcgcgcaacaaatcggctgtcatcgagatagccatgttcatggcaccaggcaataacgcgctcgtaatcttctgccgtagcatcaatctcttctgggccatttttgcccataatcggtgccgcgagtttacgtcgcagttcttgctcactgtgatcgcgcaccgccagaatgcgtaccgcacgatccaacaggcgagcatatgccgggcgacgggatgttgattctgtcatggcatatccttacaacttaaaaaagcaaaagggccgcagatgcgacccttgtgtatcaaacaagacgattaaaaatcttcgttagtttctgctacgccttcgctatcatctacagagaaatccggcgttgagttcgggttgctcagcagcaactcacgtactttcttctcgatctctttcgcggtttccgggttatctttcagccaggcagtcgcattcgctttaccctgaccgatcttctcacctttgtagctgtaccacgcgcctgctttctcgatcagcttctcttttacgcccaggtcaaccagttcgccgtagaagttgataccttcgccgtagaggatctggaattcagcctgtttaaacggcgcagcgattttgttcttcaccactttcacgcgggtttcgctacccaccacgttttcgccctctttcaccgcgccgatacgacggatgtcgagacgaacagaggcgtagaatttcagcgcgttaccaccggtagtggtttccgggttaccgaacatcacaccaattttcatacggatctggttgatgaagatcagcagcgtgttggactgcttcaggttacccgccagcttacgcatcgcctggctcatcatacgtgccgcaaggcccatgtgagagtcgccgatttcgccttcgatttccgctttcggcgtcagtgccgccacggagtcaacgacgataacgtctactgcgccagaacgcgccagggcgtcacagatttccagtgcctgctcgccggtgtccggctgggagcacagcaggttgtcgatatcgacgcccagtttacgtgcgtagattgggtccagcgcgtgttcagcatcgataaacgcacaggttttaccttcacgctgcgctgcggcgatcacctgcagcgtcagcgtggttttaccggaagattccggtccgtagatttcgacgatacggcccatcggcagaccacctgccccaagcgcgatatccagtgaaagcgaaccggtagagatggtttccacatccatggaacggtcttcacccaggcgcatgatggagcctttaccaaattgtttctcaatctggcccagtgctgccgccaacgctttctgtttgttttcgtcgatagccatttttactcctgtcatgccgggtaataccggatagtcaatatgttctgttgaagcaattatactgtatgctcatacagtatcaagtgttttgtagaaattgttgccacaaggtctgcaatgcatacgcagtagcctgacgacgcaccgcatcacggtcgccgctgaagcattcccgccgggtaatgccttcaccgcgggcagtggcaaaagcaaaccagacggtgccgacaggcttctcttcactgccgccatccggcccggcgataccactaatagacacggcataatcagcacgagccgctttcagtgcgcctatcgccatttccaccacgacgggttcactcaccgcgccatgctgcgccagcgtctcttcgcgtacgccgatcatctgcgctttggcttcgttactgtaggtgacaaatccgcgttcaaaccaggcggagctaccggcaatatcggtaatcactttcgctacccaaccaccggtacaagactcggcagttgttacggttgcgccacgggctttcagcgcctgcccaacctgttcacttaactgcatcagttcactgtcagtcatcacaacctctgtcagtcaaaaatttatgccggacaagatagcactttcgtcaggaagatggtgttggcgttgcaattttacgaggaggattcagaaaaaagctgattagccagagggaagctcacgcccccctcttgtaaatagctactgtactcgcgccagcgccacggcttgtcctaactgccagaccgccattgcgtaatgggtgctgtggttgtaacgggtgatggtgtagaagttcggcagaccgtaccagtactggtagccggtgccaacatccagacgcagcaggctggcttgttgatggttgcccagcggctgctgtggcgttaaacctgcggcggcaagctgcgaaatgctgtacttagttttgaagccatttggcaagcctggagcctgaccgtttgccattaccgcgacctgatcgcctttcacccagccgtgcgctttgaaatagttcgccacgctaccgatcgcatcaaccggatcccacaggttgatatgcccgtcgccgctgaaatctaccgcatattgtttgtaagacgacggcataaactgtccgtagcccatcgccccggcaaaggaacctttcagattgagcggatcgtcctgctcgtcgcgcgccatcaacaggaaggtttccagctcgccagagaaatactccgcgcggcgtgggtagttaaatgacagcgttgccagcgcatcgaggatgcgagttttccccatcacgcgcccccagcgggtttcaacgccgataatcccgacgataatttccggcggtactccatacacctgccacgcgcgattcaacgcatcttcatactgattccagaaaaccacaccgttctgcacgttgtccggcgtaataaattttttgcgataacggagccatgcgccgttcggacctgatggcggtttcaccgatgtggttggtgcctggttatccatcagccgcagtaccgaatccagacgcttcgcctgggagagaatttcctgcaactgctgacgatcgaaaccgtgtttgttcaccattttgtcgatgaactgctgggcattcgggttattagcgaaatcgccgcccatctgcatcacattgtgctgcggctcaagcaggaagccgccagacggcgttccggtggtcgtatcagtctcagtaggttttggcttgctgctacaggcggcaagcaacacaaaaaggggaagcaatgttacataacgacgcttgaacatgaggggtccatttaacagattcaaccaggggcaagtatggtaaagcatcacgccccgcacaaggaagcggtagtcactgcccgatacggactttacataactcaactcattcccctcgctatccttttattcaaactttcaaattaaaatatttatctttcattttgcgatcaaaataacacttttaaatctttcaatctgattagattaggttgccgtttggtaataaaacaataaatcctgaaggagagaacaatgatagaaaccattactcatggtgcagagtggtttatcgggctgttccaaaagggcggagaggtgtttaccgggatggtgaccggcattcttccgctgttgattagcctgctggttatcatgaacgcactgattaattttatcggtcagcatcgtattgaacgttttgctcaacgttgcgccggtaaccctgtttcccgttacctactgttaccgtgcattggcacgtttgtcttttgcaatccgatgaccctaagcctgggtcgctttatgccggaaaagtacaaacccagctactacgcggcggcctcttatagctgccactcaatgaatggcctcttcccccatatcaaccctggcgaactgtttgtttatcttggcattgccagcggtctgacaacgctgaacctgccacttggcccactggcggtgagttatctgctggttggtctggtcaccaatttcttccgcggctgggtgaccgatctgaccaccgccatttttgagaaaaagatgggcattcaacttgaacaaaaagttcacctggcaggagcaacatcatgacgcatattcggatcgaaaaaggaacgggtggctggggcggcccgcttgagctgaaagccacgccgggaaaaaaaatcgtctatatcaccgccggtacccggcctgcgattgttgacaaactggcacagcttactggctggcaggctattgacggatttaaagaaggtgaacccgcggaggcggaaattggtgtcgcggtaatcgactgtggcggcacattacgctgcggcatctatccgaaacgacgtattcccaccattaatatccactcgacgggcaagtccggtccgctggcgcagtacattgtggaagatatttatgtctctggcgtaaaagaagaaaacatcactgtagtaggtgatgcgacaccacaaccctcttccgtgggccgtgactatgacaccagtaagaaaatcaccgaacaaagcgatggtttactggcgaaggtgggaatgggcatggggtccaccgttgcggtgctgtttcaatctggtcgtgacaccatcgacactgtattaaaaaccattctgccgtttatggcattcgtctcggcgctcattggcatcattatggcttctggccttggtgactggattgcccacggtcttgctccgctggcgagccatccactgggtctggtcatgctggcgctcatctgttccttcccactgctttcacctttcctcggcccaggcgcagttatcgcacaggttatcggcgtattgattggcgtgcagattggtctcggcaatattccgccgcatctggctttaccggcactgtttgccatcaacgcgcaggcggcctgcgacttcatcccggtcggtttgtcgctggcggaagcccgtcaggacacggttcgcgtcggtgtcccttctgtactggtgagccgctttttaaccggcgcgccgactgtactgatcgcctggtttgtctccggttttatctatcaatagaggctgaaacatgaccgttatttatcagaccaccatcacccgtatcggcgcgagtgccattgacgccctcagtgaccagatgctcatcacctttcgtgaaggcgcgcctgcggacctcgaagagtattgcttcattcattgccacggcgagttgaaaggtgcactccatcccggtttgcaattttcactcgggcagcatcgctatccggtgaccgctgttggcagcgtggcggaagacaaccttcgcgaactgggtcatgtcaccctgcgcttcgatggtttaaacgaagcggaatttccgggcactgtccatgtggcaggccctgtccccgacgatatcgcgccgggatcggttttgaagtttgaatctgttaaggagtaaaaaatgaatcaggttgccgttgtcatcggtggtgggcaaaccttaggcgcgttcctgtgccacggtctggctgccgaggggtatcgcgtcgcggttgtcgatattcagagcgacaaagccgcaaatgtggcacaagaaattaacgccgaatatggtgaaagtatggcgtacggttttggtgctgacgccactagcgagcaaagcgttctggcgctctctcgtggggtagatgaaatctttggtcgcgtggatttgctggtctacagcgccggaatagcaaaagcagcctttatcagcgacttccagctcggcgattttgaccgttcgctacaggtgaatctggtgggttatttcctgtgtgcgcgtgaattttcgcgtttgatgatccgcgacgggattcaggggcgcattattcagatcaactcgaaatccggcaaagtgggcagcaaacacaactctggctacagcgcagcgaaatttggtggcgtcgggctgactcaatcactggcgctggatctggcggagtacggcattacggtgcattcactgatgctcggtaacctgctgaaatcgccgatgttccagtcactgttgccacaatacgcgaccaagctgggtatcaaaccggatcaagtcgagcagtattacatcgacaaagtaccgctcaaacgcggctgcgattatcaagatgtgctgaatatgctgctgttctacgccagtcctaaggcgtcgtactgcaccggacagtcgatcaatgtcaccggcggtcaggtgatgttctgatcaacagcggagatccattaaggatctccgtgagactatagaatgcctgatgcgctacgctcatcaggcatacaggacttccgccactacattaaggaaaagttatggtatccgcactcatcaccgtcgccgttatcgcctggtgtgcgcaactggccttaggcggctggcaaatttctcgttttaaccgtgccttcgacacactatgccagcaagggcgggttggcgtgggccgttccagcgggcgctttaaaccgcgggtcgtggtcgccatcgcgctggacgatcagcagcgcatcgtcgacaccttgtttatgaaaggactgaccgtcttcgcccgaccgcaaaaaattcccgcaattaccggtatgcatgcgggtgatttacagcccgatgtgatctttccccatgatccactatcacagaatgctctatcattggcgcttaaactgaaacgtggataatttcgttgtgaatgttacttgcttgcgaagttatcattttgaaacctaaatcaggtaatcacgcccatgaaacctcgtcagcgtcaggccgccattctggagtatctgcaaaagcagggtaaatgctcggttgaagaattggcgcaatactttgacaccacaggcacaaccattcgcaaagatctggtcattctggaacatgccggaaccgtcattcgtacttatggcggagtggtgttgaataaagaggaatccgatccgcctatcgatcataaaacactcatcaacacccacaagaaagagctgattgcagaagctgccgttagttttatccatgatggcgattcgatcattcttgatgctggcagtaccgttttgcagatggttcccctgctctcgcgctttaataacatcacggtgatgaccaacagcctgcatatcgtcaatgcgctatccgaactggataacgaacaaactatcctgatgccaggcggaacgtttcgcaaaaaatcggcctcatttcacgggcaactggcagagaatgccttcgagcatttcaccttcgataaattgtttatgggcaccgacggcatcgatctcaatgcgggcgtaaccacctttaacgaggtttataccgtcagtaaggcaatgtgcaatgccgcgcgcgaagtgattttgatggcggactcatcaaagtttggccgtaaaagccccaacgtagtttgcagtcttgaaagcgtcgataagctgattaccgacgcaggtatcgatccggcgtttcgtcaggcgctggaagagaaagggatcgatgtgatcataaccggagagagcaatgagtgaagcactactgaacgcgggacgtcagacgttaatgctggagttgcaggaagcaagccgtttaccggaacgtctgggcgatgattttgttcgcgccgccaatatcatcctgcactgtgaaggcaaagtggtggtttcgggaattggcaaatcgggccacattggtaagaaaatcgccgcaacgcttgccagtaccggcactccggctttttttgtccatccggcagaagcgctgcacggcgatctggggatgatcgaaagccgcgatgtgatgctgtttatctcttactccggtggcgcgaaggaactggatctgattattccgcgtctggaagataaatctatcgcgctgctggcgatgaccggcaaaccgacgtcaccgctgggcctggcggcaaaagcggtgctggatatctccgtagaacgcgaagcctgcccgatgcaccttgcgccgacctccagcaccgtcaataccctgatgatgggtgacgcgctggcgatggcggtcatgcaggcgcgcggatttaatgaagaagattttgcccgctcccacccagccggggcactgggcgctcgcttgctgaataaagtgcatcatctgatgcgccgtgacgatgccatcccacaggtggcgttaaccgccagcgtgatggatgcgatgctggaactcagccgcaccggtctggggctggtggcggtatgtgacgctcaacaacaggtacaaggcgtctttaccgacggcgatttacgtcgctggctggttggcggcggcgcactcaccacgccagtcaatgaagcgatgacggtcggcggcaccacgttgcaatcgcaaagtcgcgccatcgacgccaaagagatcctgatgaagcgcaaaatcactgccgcaccggtggtggatgaaaacggcaaactcaccggcgcaataaacctgcaggatttctatcaggccgggattatttaatccttcaatcccagacgtttcgccagccgatgcaggttggcgacgtcggtttccagcatccgcgcgcaggcagcccagttgtgatgattttgtgccagtgcctgacgaatagtttcacgctggaacgcttctgtcgcttcacgcaggttttgcttaacaacgggcaccgccgccacttctggcgtcggcaacgtcacctcaggaaaagcaaaatgttgcgcctcaagaatcacttcatcgccgctgcgggtggctctcgccagaactaccgcccgatgaatagcatgttccagttcgcgcacgtttcccggaaaactgtagtgttgcagtaaatttcgcgctccggcacttaataccacgcgggagagcccctgccgcaaacgacactgctcgcagaaataccccgccagcagaatgacatcatcgccccgctcacgcagcggcggcaccgaaagtggaaacacgctcaggcgatgaaacaaatcggcgcggaatcgccctgccagcacctcttcgcgtaaatcgcggttagtcgccgccagcacgcgcacatcgacccgcaaacaacggtcatcgccaacgcgctgaatatcgccatactgcaacaccctcagcagcttggcctgcaatgccaacgacaactcgccgatctcatccagaaacagcgtgccgttatccgccatttcaaacttcccgctgcgattactgatagcgccagtaaacgctcctttcacatgcccgaacaactcactttccgccacactttccggcagtgcagcacagttgagatagaccagcggattcaccgcccgtggcgaggcttcatgaatcgctttcgccaccagctccttaccggttccagtctcaccgctgatcaggacgttgagatcggacgccgccacaatctcaatctcttttttcagttgcgtcatgccaggggacaagccaatcatctgcgtctgtttcaccgcttcaaacggcgtggcatcgcctggcagcatattctggctttccagttgttcaatcagcaacgcattgcttaacgctcccgccgccagcgcagcaatcagccgtagctcttcgtcgctgaaaacatcgaactgatcgggctgcatcccgtcgagcgtcagtgcgccgatcaggttttgcccggcaaacaatggcagaccaacgcaggcgtgaaccttcagactctcctgcccaggaatcaaaccgtcatagggatcgggcaattcgctgtctgcgggaaagcgcaccacatccccggcgcgggcaatcgcttccagccgtggatgcccttccagcgcaaagcgtctaccgagtacatcctttgccagaccgtcgatggcaagcggaataaactgccgcgaatcgtaacgtagcaacgcagacgcatcgcactccagcacctgacgtagcgtggtgatcaggcgctgaaaacgatcctggtgaccaatcccacgctgcaattcgatggcgatattcgccagcacatcaacggaaaaactcatctttgcctcactgtcaatttgactatagatattgtcatatcgaccatttgattgatagtcattttgactactcattaatgggcataattttatttatagagtaaaaacaatcagataaaaaactggcacgcaatctgcaattagcaagacatctttttagaacacgctgaataaattgaggttgctatgtctattgtggtgaaaaataacattcattgggttggtcaacgtgactgggaagtgcgtgattttcacggcacggaatataaaacgctgcgcggcagcagctacaatagctacctcatccgcgaagaaaaaaacgtgctgatcgacaccgtcgaccataaattcagccgcgaatttgtgcagaacctgcgtaatgaaatcgatctggcggatatcgattacatcgtgattaaccatgcagaagaggaccacgctggggcgctgaccgaactgatggcacaaattcccgatacgccgatctactgtacagccaacgctatcgactcgataaatggtcatcaccatcatccggagtggaattttaatgtggtgaaaactggcgacacgctggatatcggcaacggcaaacagctcatttttgtcgaaacaccaatgctgcactggccggacagcatgatgacttacctgacaggcgacgcggtgctgttcagtaacgatgctttcggtcaacactactgcgacgagcatctgttcaacgatgaagtggatcagacggagcttttcgagcagtgccagcgttactacgccaatatcctgacgccgttcagccgcctggtaacaccgaaaattaccgagatcctgggctttaacttaccagtcgatatgatagccacttcccacggcgtggtatggcgcgataacccgacgcaaattgtcgagctgtacctgaaatgggcggctgattatcaggaagacagaatcaccattttctacgacaccatgtcgaataacacccgcatgatggctgacgctatcgcccaggggattgcggaaaccgacccacgcgtggcggtgaaaattttcaacgtcgcccgaagcgataaaaacgaaatcctgactaatgtcttccgctcaaaaggcgtgctggtcggcacttcgacgatgaataacgtgatgatgccgaaaatcgccgggctggtggaggagatgactggtttacgcttccgtaacaaacgcgccagtgctttcggctctcacggctggagcggcggtgcggtggatcgtctttccacgcgcctgcaggatgcgggtttcgaaatgtcgcttagcctgaaagcgaaatggcgaccagaccaggacgctctgaagttatgccgtgaacacggtcgcgaaatcgcccgtcagtgggcgctcgcgccgctgccgcagagcacggtgaatacggtagttaaagaagaaacctctgccaccacgacggctgacctcggcccacggatgcagtgcagcgtctgccagtggatttacgatccggcaaaaggcgagccaatgcaggacgttgcgccaggaacgccgtggagtgaagtcccggataacttcctctgcccggaatgctccctcggcaaagacgtctttgaagaactggcatcggaggcaaaatgagtaacggcattgtgatcatcggttcgggcttcgccgcccgccaactggtgaaaaatattcgcaaacaggacgccactattccattaaccctgattgccgccgacagcatggatgagtacaacaaacctgacctcagccatgttatcagtcaggggcaacgtgccgatgaccttacccgccagacggcgggtgaatttgccgagcagtttaatctgcacctgtttccacaaacctgggtgacggatatcgatgccgaagcccgtgtggtgaaaagccagaataatcagtggcaatacgacaagctagtactggcaaccggtgccagtgcctttgtcccgcctgtgcctgggcgtgagttaatgctgacgttaaatagtcagcaagagtatcgcgcctgtgaaacgcaactgcgggatgcccgacgcgtgttgattgttggcggtggtttgattggtagcgaactggcgatggatttttgtcgtgcaggcaaagcggtcacgctaatcgacaacgctgccagtattctggcgtcgttaatgccaccggaagtaagcagccgcttgcagcatcggttgacggagatgggcgttcatctgctgttgaaatctcagttacaggggctggaaaaaacggattctggcattcaggcaacgctggaccgccagcgcaatatcgaagtggatgcggtaattgccgccaccggactgcgcccggaaaccgccctggcacgacgcgccgggctgacgattaatcgcggcgtttgcgtcgatagttatctgcaaaccagtaataccgatatttacgcgctgggcgattgcgcggaaattaacggtcaggtattgccgttcctccagccgattcaacttagcgcgatggtgctggcaaaaaatcttctcggcaataacacgccgctgaaactcccggcgatgctggtgaaaatcaaaacgccggaattaccgctgcatctggcaggcgaaacccagcgtcaggatttacgctggcaaattaataccgaacgccagggaatggtggcgcgcggcgttgacgatgctgaccagcttcgcgcctttgtggtcagtgaggatcggatgaaagaggcatttggattgttgaaaacattgccgatgtaggtgggctactgtgcctaaaatgtcggatgcgacgctggcgcgtcttatccgacctacggggacgcatgtgtaggccggataaggcgtttacgccgcatccggcaatggtgtccaaatgcaacacgttttatccgttctggacttcacccgctaaccaacgcgccgcagcaataaccccctgccccagagacaaaccgccatcacccgccggtaaactctgtggaaagagcaatgtgaaatcagcgagataatgcgccagacgtgcacgcagcaaacggttatgaataaccccgccgctaaataccagcgtagtgataccacgcatcgtggcctgctcacgcatcaacgcggcaaaaccctgcgccagcgcatcatgaaacgcccacgcgcgttgattaaccggtgcctgccagttcagccactgctgccagaaagtggcgagatccagttgattgtccacccgcggcattgtcaccggatgcgtcactccgtggcatgaggctgcgagcgcctccagagcacaagccgcttcaccttcataacttaacgtggctggcgcacagcccagtgccgccgccactgcatcgaaaaaacgcccacacgatgacgccagcggcgcgttaattccacgctcaatggcccgcgccagcacgctccagttttgctgttgcacacttgctgtttcagagtaattctgccactccggcacaaagcgcaggcactgcgccagcaggtttcgccacggctgcttcgctgccaaatcgccacccggaagcgccactgcaggcaagccgcccaggtgctcacattcgcgatagttcacccgcaggcactcgccgccccacaaagcgccgttctcccccataccgataccgtcgagcgtcaaagcaatgacatcaccgccatccagcggccactgatgctctgccagacacgccgctgcatgggcatgatgatgcagtaccgtttgcgtcggcagattcatttcacgcgcccactggctggagacatagcccggatgcgcgtcatgcacaacgtattgcggggtaaaatcgtagatgttttgcatcaggcgtaacgcttcgcgccactgcatctggatgccatcgtcacttaaatcgcccagatgctgactcaacaccgcttgttcaccgcgcaccaggcagaaggtatttttcagatccgcgccgagacacagcacaggcggaacatttttaaagcccggaggcaaagccagcgcatccggcacatacccccgcgaacggcgcagcatttcgccgctttcgcgcaccaccgaatcatccatccgctgcacgatgtcgcggttatgtatcaagaatccgtcggcaatgccctgcaaatccgccagcgcctgttcgttgctgatagctggtggtttaccgctcaggttgccggaggtcatcaccagcgggcattgcagttcctgtaacagcaaatgctggagcgggttcgcaggcaacattaccccgacttcgttaaggtcaggggcgatatcatcacaaagctcaggaacgtattttttatccaccagcacaatcggcgcggcgggcgtggtaagcaactggcgcgcagcgtctggtaaaccgtcagccactggcaacatgaccgccagcggtttcgccgggcgatgtttgcgcgcccgaagtgtcgccaccgcgttactgttacgtgcatcgcaggcaagatgaaatccgccaatccctttgatggcgacaattttgcccatttttaactgtgcgatagctgcctgtaatgccgcctcttgttccgcatgttcaccatgacttacccattcaagatgcgggccacactccgggcaggccaccggctgggcgtggaagcgacgatcgagcgggtcacggtactctttgtcacaggccggacatagcggaaacgccgccatcacggtaaacgggcggtcgtaaggcatggcgcgaataatggtgaaacgcgggccgcagtgggtacagttgataaacggataacgataacgccgttcgcctggggtattcatttcggcaaggcaagcagggcaagtagcggcatcgggaacaatttgcgtattcatggtgccgcctgtgctctggcgtatagtgaactcggtgggcagttgtgaccagataaacggctcacgctcgacgctatcaatacgcgccagcggcgggcagtgctgatacaattgaacaagaaacgtttccgggtcttcccgcagccggacttctacgccatcgccgtcattacagacatcgccgtgaagatttaattgctgtgccagctgccagacaaacggacgaaaaccgacgccctgcactttgccacgaatacgcagttggacaccgcaagatgtgttttttgccattgagttattcccgccatcatgaattgcgtaacccgccctgccggacacgacagcgtcgcatccggcagtcacaggtcggcgataccgcccgctccgtattctacgaatatttccgggaattcctttgatgccagaacagttctgtaagatttttagaacatcagcgccgtacggcggcgtttttctgcgctcagttgttcaagtttattacgatcgacacaaatcagcgcatgagtcgggcaagccgccatacacgccgggccgtcttcacgatggttgcacaggtcgcatttattggcttcggctttgtcagcccgtacattcagacccgcgccgctgttgcggatcaccggacgtaccaccacttccatcgcaccatacgggcaagccacaacgcaggttttgcaaccaatgcaacgttcctgcatcacatgaacaaaccctttatcacggctgatagcaccattcgggcagacgttagcgcacggtgcatcttcacactgacggcaaactgtcgccgtggaaatgttcacacctttaatgacatggatacgcggtaaaaaagtttccggggtcagcgatgcacagtcctgattttcctgatgagaaaccacgcacgctacttcacaggtacggcaaccaatacatttactcgcgtcagcaatgatgaaacggttcatcaaattctccagcaatgacagttaatgcgccgatacattcacaaatcatgccagtttttaatttactgttatttaaggaaattaatttctgtaatgcaggaaaaacgatgtcatcgacactagtgacgatgacatgtgatgacaatgtttatcgcgaaggagcaatgagtgagtcgcggcggatcagttttccgctgaaggttttcggcggtgagaaatccccgccatcgagcataaaaatcagccgtccaataatttcctgaatcatctcagtcaccggaatttttacgctggagagcgccggaacggtgtagggggcaatagcgatatcatcgaatccgataactgacacctgctctggcaccgctacgccgcgctcgtgtaacgctttcatcgcacctatcgccatatcgtcgttactggcaactaacgcgctaaatttagccccacgttcgagcaacatttctaccccttcggccccgctggcaggcgtccatttaccgttagcgataagtttttcattgagcgcaataccatgctgcgccagcgcgtctttatacccggcaagacgttcaatgctggtgggggaatccatcgagccggtaaggaaagcaatctcctgatgcccggcgtttatcaactctgccacggcgttaaaactggtctgtttatgatcgcaccagacgctatggctgctgtttttgcgcaggcggcgattaagcaccattatcggctgactgtgcgcgtcaatgatgtcatcgatctcatccacgcttaaaaaacgcgggtaaatcatgatcgcgtcgcagcgcagatccagcagatactgaatcgcctggcgctcttcttctgcgctgtgtttaccatctgccaatagcaactgccgccctttctcttccgccattcgcgcggcatgaaagagtaattcactaaaataaatgccgtggtaaagcgtgttggtcactaccagccccagcgtctgagtactcttcgccgacagattgcgcgccagcaagtttggacggtaaccgctctcttctaccgcctgaaacacgcgatctttagtctcctggctgacgtagccattacctgaaagcacgcgggaaacggtcgcttttgaaaccccggcgcgcttcgccacttccagcatcgtcgtcatcattttcatccctttacacgcaatcaacgcagtgtactgcaccgtttgccgattgtccttgcacaatcggcgggaaaaatattcaggtgaccggtttcacaaatataaaaaatgaacaattcactctcttgcttatttagtgacaactattcatgattttgtgaaaccggtttcttaattccgtttcagcatcggcatttttccgtcacgtcgactgataacaactacatctaccctactgataacaggataaaatccgatggccaaaaattatgcggcgctggcacgctcggtgatagcggcactgggcggcgttgataacatctcggcggtcacgcactgtatgacgcggttgcgctttgttatcaaagatgatgcacttatcgacagcccgacgttaaaaaccatccccggcgtgctcggcgtggtacgtagtgacaaccagtgtcaggtgattatcggcaataccgtttcacaagcctttcaggaagtcgtcagcctgctgccgggagatatgcagcccgcacagcccgtgggtaaacccaaactcacgctacgtcgcattggtgcggggatcctcgatgcgctgatcggcaccatgtcaccgctgatcccggcgattatcggcggatcgatggtcaaactgctggcaatgatcctcgagatgagcggcgtgctgacaaaaggatcgccgaccttaaccattctgaatgtgattggtgacggtgctttcttcttcctgccgctgatggtcgcggcatctgccgccatcaaatttaaaaccaatatgtcgctggcgattgccatcgcgggtgtgctggtacatccgagttttattgaactgatggcgaaagcggcccagggtgaacatgtcgaatttgccctgattccggtcaccgcggtgaaatacacctacacggtgatcccggcgctggtgatgacctggtgcctgtcatatatcgaacgctgggtggacagcattacaccggcggtgaccaaaaacttcctcaaaccaatgctgattgtgttgattgccgcaccgctggcaatcctgctgattggcccgattggtatctggatcggtagcgccatttcggcgctggtttacaccattcatggttatctgggctggctttcagtcgccattatgggcgcgctgtggcctctgctggtaatgaccgggatgcaccgcgtctttacgccaaccatcattcagaccattgccgaaaccggcaaagaagggatggtcatgccgtcagagatcggcgctaacctgtcgctgggcggttcatcactggcagtggcgtggaaaacgaaaaacccggaactgcgtcagacggcgctggctgcggcggcatcagccattatggcggggatttccgaaccggcgttatatggcgtggcgatccgcctgaaacgtccgcttatcgccagtcttatcagcggttttatttgcggcgcggttgccggtatggcggggcttgccagccactcaatggcagcgccggggctatttaccagcgtgcagttcttcgatccggcgaatccaatgagcatcgtctgggtgttcgcggtcatggcgctggcggtggtgctgtcgtttatcctcacactgttgctcggctttgaggatattcctgttgaggaagcggctgcccaggcgcgaaagtatcagagcgtacaaccgaccgtcgccaaagaagtaagtcttaattgaggatgaaaatgtcagtatttccagaaagttttttatggggcggcgcgcttgccgccaaccagtctgaaggtgcgttccgtgaaggtgacaaaggtctgaccactgtcgatatgatcccacacggcgagcatcgaatggcggtgaaactggggctggaaaaacgttttcagttgcgagatgacgagttttatcccagccatgaggcgacggatttttatcatcgttataaagaagatatcgccctgatggcagagatgggattcaaggttttccgtacctcaattgcctggagccgtctctttccgcagggcgatgaaatcacgcccaatcagcagggcattgctttttatcgttctgtctttgaagagtgtaaaaagtacggtatcgaaccgctggtcacgttgtgccacttcgatgtgccgatgcatctggtcaccgaatatggctcctggcgtaaccgcaagctggtggagtttttcagccgctacgccagaacctgctttgaagcatttgatggtctggtgaaatactggctaaccttcaatgaaatcaacattatgttgcatagcccgttctccggcgcgggtctggtgtttgaagaaggtgaaaatcaggatcaggtgaaatatcaggccgcgcatcaccagctggttgccagtgcgctagccaccaaaatcgcccatgaggttaacccgcaaaatcaggtgggctgtatgctggcgggcggtaacttctacccttacagttgcaagccggaagatgtctgggcggcgctggagaaagaccgggaaaacctgttttttatcgatgtgcaggcgcggggcacgtatccggcttactctgcccgcgtattccgcgaaaaaggggtaaccatcaacaaagcaccgggcgatgatgaaatcctgaaaaacaccgtcgattttgtctctttcagctattacgcctcgcgctgcgcctcggcggagatgaacgccaacaacagcagtgcggcgaacgtggtgaaatcgctgcgtaatccgtatctacaggtgagcgactggggctggggaattgatccactcggtctgcgtatcaccatgaatatgatgtacgatcgttatcagaagccgctgtttctggtggaaaacggcctgggcgcaaaagatgaatttgctgccaatggcgagattaacgacgactatcgcatcagctacttacgcgaacatatccgcgcaatgggcgaagcgattgcagacggcattccgctgatgggctacaccacatggggctgtattgatttagtttccgcctctacgggtgaaatgagcaaacgctacggctttgtctttgttgaccgtgacgacgcaggcaacggtacgctgacgcgcacgcgtaagaaatcattctggtggtataaaaaagtgattgccagtaatggggaagatttagagtaggtaacagtgccggatgcggcgtgaacgccttatccggcctacatgtcgcacgaaccatgaaggcccgataagcgcagcgcatcgggcaatttagcatttggcatcagagctggttcaccccatcaagaacatccctgtcctgattccttaatgaaaaactactcttcttccaccgctaactgcgcgaagccgccatttccttcccagccttccagtcgttgataaacggtttctaccgcatctttaatcggctgggtcatcgggtagtaaaagccgacgatatccggctgaatgccgaggaaaatcacttcgccaatatcttctttcaactggtcgataaggtaattcaacggcatgttatgggtagtcatcataaacatctcggcgatatcatccgggtcgatgatgcggatctcgccggggtttagccccatatccgtggcgtcgacaatcagcagtcgtgtcgggcgcagttcacggatagcgacgatgtcgttttccggtgcgctaccgccgtcaatcaccacccagttacctttcggcgcggcggcgcacttttccgccagcagcggacctgcgccatcatcgcccatcatgctattgccaacacagagtaaaacgtcagtcacgcagtctcctcaccatcaaatagatggcgttttcctgatgaatatcatgcagcatacttaacagcattgtactccattcctgctgctgcgaagtttgcgctgcccgggctttatcgaatgcgttggccagcatcggcacatggttaatgtcgatgacgatctcaccatatttcggcacgccttccattttgcggcgggcttcactgcctgcctccagagtggcaatccatgccagatattcatcccacgggcaggtgagcgccgcttccaggcaatcgataaccccaaggtggtgaccaatcgccaggctgtaatagaccacctgctgcgcctcggcgggcgtggcatcgttctcatcaataaatttacggctcagttgactgaacaccaccttttcactcatcggatacgcgcctcttcaacaacatgattcagatggctgacaatctcgttcagacgcggatcgttttccgcttccagccagcgtgcaacctgttcttcgccctgccctaactgtgtaaggtaatcatcggcaatctgacgaccgtaacgataacccgccaggcgacgtgcttcgcgatccactttcacgcgcagcggctgcaccatatcaccatgcaggatctccgccggttgttcatccagttcacccggcccacgggcgtgaattttctgctccagcaggccgagcgccattgcaaagccgtacagcgtggcggcaggcgttggcgggcagccagggatataaacatccacagggacaattttatccgtaccgccccacacgcagtagagatcgtggaagatcccgccactgttaccgcaggcaccgtaggagatacaaattttcgggtccggcgcggactgccacgcacgcagcgcaggggatcgcattgcacgggtgaccgcgccggtaaacagtaaaatatccgcatgacgcggtgaaggaacgactttaatgccgaagcgttctgcatcaaacagcggcgaaagcgtggcgaaaatttcgatttcgcaaccgttgcagccgccgcagtccacgcggtaaacataggcagaacgtttgatttttttcagtaacgacgccttcatgctggcgatggattcatccaccgtcatggggaccggaatgccgttggcgtcacgggggcctaataaattgctcatcagatggcctctttcatatggcgagtcagttcaatacggtcggacggcaccaggcatttctggcgcttacattccgggcaagtctcaaagctttcgcggtggttttccgcgcggctgtcgccgttgtgcttaagcagcgcaatggcgtagtcgatctctttctggacggcgaaaggacgattgcagacgcggcagttgcacagcgcgaagcgggactgttgcaggaagtcttctttcttccacaccgccagttcgtactcttgcgacagtttgatcgccgccgtcgggcagacttcttcgcagcgtccacagaagatgcagtgcccaagattaaactcccaggcaagctctcctgtggcgaggtcagtttcaaccgttaaggcgtttgacgggcaggcattgacgcaggccgcgcagccgatgcactgctgcgggttctgctctggcttaccacggaagtttttatcaaccgcaatcggctccagcggataagacgaggtcgccgtgccggttttgatgacttttttgataaaggtaaacatggcgattccttatttcagcggcgagtttttacgctcaatgctgtaacgctcgagttctttgtacggcaccactttgctcttcttcttacgcacatcgaccacggtcatgcggtcggtacaggagtagcaagggtcgaggctaccgataatcagcggcgcatcggaaacggtgttgccgcgcagcatgtagcgcagggtcggccagttcgcgtaggtcgcggcacggcagcgccagcggtacagcttctggttgtcgccggtcatgctccagtggatatcatcgccgcgcggcgcttcggcaaagcccagcgcaaagcggtgcggaatgtaggtaaagccttccaccatcagtgggccacccggcaggttatccagaccgtagtcgatcatgttcagcgcggtatagacttcgttgatacgcactttcagacgggaaataacgtcgcagccctgctcgctgtggacttccattggcagcaggccatagccgacaaacgggtgatcggcgcgggtatcacgggcgtgaccgctggcacggaccatcgggccgacgttactgaagtcgcgagcgatttccgggtccagacgaccaatgccgacagtgcgctgttccatgttcggagtgctcagcagcacatccaccagctcctgcacttcacgacgcatctgttgtgccagctggcgggtctggatcatgtcgtctttcagcagatcgcgacgaatcccgccgatcaagttcaggccgtaggttttacgcgcaccggtaaggatctctgccattttcatggaggtttcacgcacgcggaagaactgcataaagccggagtcgaagccggtaaagtgacaggccaggccaaggttgagcagatgcgagtgcaagcgttctacctccagcagaatggcgcggatcatctgcgcacgttctggcacctgaatacccatcgcgttttccaccgacgtggtgtaggcggtgctgtgggcaaagccgcagatcccgcacacacggtcagagaggaaggtcacttcgttataacccatacgggtttccgccagtttttccatgccgcgatggacgtagaacagacggtagtcggcgtcgataatgttttcgccatcgacgaacagacggaagtggcccggttcatcagaagtgacgtgcagcggaccaatcggcacgacgttgtttttcttgtcgcccagttcgttgatgaactcgtaggtttcagcatcggtggtcggtgccggacgctgacgataatccatgctgtctttacgcagcggataaagttcatccggccagtcatccggcagcaccagacgacgttcatccggcagaccaaccggaatcaaaccgtacatatcgcgcacttcacgctcgccccacaccgccgccggaacgcgcggcgtcacggacggatattccggtttgttggcgtcaacttcgacgcgaaccgtaatccaacacttagtgcccttctccatcgacagcacgtagtaaacggcgtaatgaccattcagtttgcgttcgtcgttaccaaacagcaccgacagccagccaccctgtttgtagtaaagaaactccaccacttccggcaggtagttcacctttacggtgacagtcagctgatctttggtctgccaggcgtggtccagcacgacgcccggaaatgcctcattcagcgcggcgagataatgttgacctaatttttcttcagacatgctcaaactctctttaatcacgccgccagcaaggagacgaacgctaaaaatgcaaagccaaacccagcccaggtaatgcgcggagtaatatcaagacgcagacgggccatgctgttttcgaacagcgcgataaccaggacgccgaccaccagttttacgatggcaatcaccagcgccagcagcagtccaccggcggtgaaggtttccatttgtccccacggaataaacaccccgacgaacatctgcaacaccaccagctgtttcaggctgataccccatttcatgacgccaaagccgctgccgctgtattcagagagcgggccttcctgcagctcctgctcggcttccgccaggtcgaacggcagtttgcccatttcgataaaggtggcgaacgcacaggcacaaagcgccagtaccagcgggatgctctggctcagcggccagtgataaacggtgtcggtgatgttgctgatgttggtggaaccggcaacctgtgcggcaacccacagaccaagcagcagcatcggttcgaccagcacgccaagcatcgcttcacggctcgcgccgatagcggtaaacgggctaccggtatccagaccagaaatggcaaagaagaaacgcgcgatggcaaagagatacagtaaggtgatcaaatcacccagttgcggcagcggagaaccgacggtcaccaccggcagcgcagtagcgatagtcagcatgacgcccaccatcacatacggcgtcaggcggaacacccagccggaggcatccgggccgacgctctgacgccccagcagtttgataatgtcgcgatactcctgcaacacgcccggcccgcgacggttatgcaagcgggcgcgcgccacgcgggttataccggagagcagcggcgcaacggcaaataacaccagcgcctgaattaacggatataaaacactcattctcaggctcctcgtgaaacaataatcaccaccagtaccgccagttcaaccagcgccatccggcggaacagcaacgcactcccctcgcactgccagcccggcaccagagacaccggattcagccatttgcgtagtttcagcaccggcgcaaacgcctgtttcaccggcatggcaaaaccgtgagcggtaatcaccattgatttttcgtggtcgtaaccgcacacccaggccgcaccgcgggaacgcgatggcaaacgatcgcctttgcaaatcgccataatgatgaatggcagcagcgggcaggcaatcagcagcaacgtgatcatcggttgagaaacggtggtgttagcaggctccagcggcagaggtacagcagcagagagcatcggcagtagccacggcgcagcaacaccgccaattacgcagcaaatcgccagtgccactacgcttacgctcatcaggagcggcgcacaggtggcgttttcggcttctttggtgcgcggcgcgccgaggaacgtgacgccatagactttcgccatacacatcaccgccagcgcaccggtaattgccagccccacagcgagcagcggccccagcagacgggcaacaaacgcgccactattgctcagtttgaaaaatgattgatagataacccattccccggcaaaaccattcagcggcggcagcgcagccattgccatcagcccgactaacatggcgatggagataaccggcattttcttgccaataccaccgagtttttcgatatcgcgatgaccggtacggaaccagacgctccccgccccgaggaacagtacgcttttgaacaggctatggttaagcagatggtacagaccaccgaccaggccaagagcaatcagcgccggttgttcgagcgcgatacccgttacgccagcgcccagccccagcaggatgatgccgatattttccagggtgtggtaagccagcaggcgctggatgttgtgctccaccagcgcatacagaccaccgacaaacgcggtgatcatgccgagcaccagcagcgcgatcccccaccacagcggtgcattaccgcccagcagtgacagggttaaaatgcccagcaggccaattttcatgactaccgtagaaaacaacgcggcagctggcgcagaggcgttcgcatgtgcctgcggcacccagccgtgcagcggaataatcccggccagcaggccaaagccaatcactccgagcagccagatatcggaaccgagcggcagctgttgcatacgcatatccagcaggcgcagatccagcgtgccgtaacgctgccacagcagccagcaagcaatcgccagcagcagagtgccaagacgccccagcgcaaaccacagtttgccctctttgctgttgctggtgaggaacaccgcgcacagggccatgatttcggccattaccacgaacatgccgaggttgctggcaatgacggcgcagacggcggcagccatcaacatattgatctgcaagccgttgcacttcacctgcgcgtggcgatgccagtcaatgttgtagaggctgacaaacagaccgcacagaccgagcgtaatcagccaaatcgcgttaagcggagagatttgcacatcgtagcttaccagcgacagcgcaccgctcacgccaaccgcgccagtcagtacagtgaagcccgcggctgccgtatacagactaccaaccgcgccgccaattccagctatccagccacttaacgctttttgaaaagaaaagagaaatgccagaacagcggcggcgacaaaccacgccacgccgctattgatcagggaaattgcgctcatttagcctctccactttgagcctgctgaaacaaggtgagatcgccaaagtccgtgttaaaggtcagctcacgcttacgtttgctgacgcgggcgatatcggtgttatccaccagatgcagggctttagtcgggcacatccgcacgcaggccggaccttgttcatcaaagctacaaaggtcacatttgacggcgatcgcgcgaatacctggcacccagtcaagcaatgtgctgacacgcgccggagcaggcggtgccggtggcgctttcggggtattggcgtttgccggaatatccagcggacggctgccggaaaattcaattgcgccaaacgggcaggcgatgccgcacagcttgcagcttacgcacaggctttcattcaactgcacggccccatcgacgcgggtgatggcgttaaccgggcagaccaccgcgcagggtgcatcttcacagtggtgacagagctgcggcgcagattctttttcattcagcatcactctcaggcgcggcattgattgcaggccgtgctggcgatgcgtctctgaacaggcggcctcacaagtgtggcagccgatacagagcgtggagtcagcaattacaaaacgattcaccaggcattcctcaggtgattgtcatttttgacgaaaacatgccgatgaaatgtcattttcgacactcatcgacacgcccatccccaaacaggcgtaacgcctgcaaaacgggcaaagcctcagctcatgctgccgggctttgtccctttaccagttggcttaaattcaccggcacattgttttcaatagcggtgtataagctgtcgtaaacgccagcgattttttcgagatagtgttccagaacctgttcgcgatcgcggatgttgaccttgccatcaatcatgccgtcaatgctcagttgcgcctgcgcaatccgctgtttgtcttcgccatcttttgtttcgacgtaatactcgatggtgtggctgttaaagccatccgccagggtgacgtaaatgcgaaaatgttcaaaaaggacgaaacagagttctttgtccggcgcgcagctcatggcgtgatgcaggcgcgctttcgataacgtgatcccctgaaccagcgaattgcagtagatgtgccactggtcctgtaggcgacgatgccgctgtgcgatgtaatcggctttctcgcttatttcccaaatagtcattgtcaggttacccgtttaacagagatgccagctttaagcattttttgtgccaacttttaatttattgttattaaagagatttttaagctaaagatgaatttcgtcgccgtgtcgacgtgtcatttcgacatcatcgacattattcaccgcagggataatcaacactggcacaattattgcttgtagctggcaatagttaatgggaggcgatatgcacgaaataaccctctgccaacgggcactggaattgatcgaacagcaggccgcaaaacacggcgcaaaacgcgtaactggggtctggctcaaaattggcgcattttcttgtgtcgaaaccagctctcttgccttttgttttgatctggtttgccgcggcagcgtggcggaaggttgtaaactgcacctcgaagaacaagaggccgaatgctggtgtgaaacatgccaacagtatgtgacgctactgacccagcgcgtccgccgctgtccacagtgtcatggtgacatgctgcagattgtggcagacgacggtttacagattcggcggatagaaatagaccaggagtgagcgatgtgtacaacatgcggttgcggtgaaggcaacctgtatatcgagggtgatgaacataaccctcattccgcgtttcgtagcgcgccatttgccccggcggcacgcccgaagatgaaaatcaccggcattaaagcgcctgaatttacccccagccagactgaagaaggcgacctgcattacggtcatggcgaagcgggcactcacgcaccgggcatgagccagcgtcggatgctggaagtcgaaattgacgtgctggacaaaaataaccgtctggctgaacgcaaccgcgcgcgctttgctgcccgcaagcaactggtgctcaacctggtttccagccctggttccggtaaaaccaccctgctgacggaaaccctaatgcgcctgaaagacagcgttccgtgcgcagttattgaaggcgaccagcaaaccgtgaacgatgccgcacgcattcgcgctaccggcacaccagcgattcaggtgaacaccggtaaaggctgccatcttgacgcacagatgattgccgacgccgcaccgcgtctgccactggacgataacggtattctgtttatcgaaaacgttggcaacctcgtatgcccggccagcttcgatctcggtgaaaaacacaaagtggcggtgctttccgttaccgaaggtgaagacaaaccactgaaatatccgcatatgtttgccgccgcctcgctgatgctgctcaacaaagttgacctgttgccgtatctcaactttgacgttgaaaagtgcatcgcctgcgcccgcgaagtcaatccagaaattgaaatcatccttatttccgccaccagcggcgaagggatggaccagtggctgaactggctggagacacagcgatgtgcataggcgttcccggccagatccgcaccattgacggcaaccaggcgaaagtcgacgtctgcggcattcagcgcgatgtcgatttaacgttagtcggcagctgcgatgaaaacggtcagccgcgcgtgggccagtgggtactggtacacgttggctttgccatgagcgtaattaatgaagccgaagcacgcgacactctcgacgccttacaaaacatgtttgacgttgagccggatgtcggcgcgctgttgtatggcgaggaaaaataatgcgttttgttgatgaatatcgcgcgccggaacaggtgatgcagttaattgagcatctgcgcgaacgtgcttcacatctctcttacaccgccgaacgccctctgcggattatggaagtgtgtggcggtcatacccacgctatctttaaattcggcctcgaccagttactgccggaaaacgttgagtttatccacggtccggggtgcccggtgtgcgtactgccgatgggtagaatcgacacctgcgtggagattgccagccatccggaagtcatcttctgtacctttggcgacgccatgcgcgtgccggggaaacagggatcgctgttgcaggcaaaagcacgcggtgccgatgtgcgcatcgtttactcgccgatggatgcgttgaaactggcgcaggagaatccaacccgcaaagtggtgttcttcggcttaggttttgaaaccactatgccgaccaccgctatcactctgcaacaggcgaaagcgcgtgatgtgcagaatttttacttcttctgccagcacattacgcttatcccgacgttgcgcagtttgctggaacagccggataacggtatcgatgcgttcctcgcgccgggtcacgtcagtatggttatcggcaccgacgcctataattttatcgccagcgattttcatcgtccgctggtggttgctggattcgaaccccttgatctactacaaggcgtggtcatgctggtgcagcagaaaatagcggcccacagcaaggtagagaatcagtatcgtcgagtggtaccggatgccggtaacctgctggcgcaacaggcgattgccgatgtgttctgtgtcaacggcgacagcgaatggcgcggcttaggcgtgattgaatcttctggcgtgcacctgacgccggattatcaacgattcgatgccgaagcacatttccgcccggcaccgcagcaggtctgcgatgacccgcgcgcgcgttgtggtgaggtattaacgggcaaatgtaagccgcatcaatgcccgctgtttggtaacacctgtaatcctcaaaccgcgtttggtgcgctgatggtttcctccgaaggagcgtgcgccgcgtggtatcagtatcgtcagcaggagagtgaagcgtgaataatatccaactcgcccacggtagcggcggccaggcgatgcagcaattaatcaacagcctgtttatggaagcctttgccaacccgtggctggcagagcaggaagatcaggcacgtcttgatctggcgcagctggtagcggaaggcgaccgtctggcgttctccaccgacagttacgttattgacccgctgttcttccctggcggtaatatcggcaagctggcgatttgcggcacagccaatgacgttgcggtcagtggcgctattccgcgctatctctcctgtggctttatcctcgaagaaggattgccgatggagacactgaaagccgtagtgaccagcatggcagaaaccgcccgcgcggcaggcattgccatcgttactggcgatactaaagtggtgcagcgcggcgcggtagataaactgtttatcaacaccgctggcatgggcgcaattccggcgaatattcactggggcgcacagacgctaaccgcaggcgatgtattgctggtgagcggtacactcggcgaccacggggcgactatccttaacctgcgtgagcagctggggctggatggcgaactggtcagcgactgcgcggtgctgacgccgcttattcagacgctgcgtgacattcccggcgtgaaagcgctgcgtgatgccacccgtggtggtgtaaacgcggtggttcatgagttcgcggcagcctgcggttgtggtattgaactttcagaagcggcactgcctgttaaacctgccgtgcgtggcgtttgcgaattgctgggactggacgccctgaactttgccaacgaaggcaaactagtaatagctgttgaacgcaacgcggcagagcaagtgctggcagcgttacattcccatccactggggaaagacgcggcgctgattggtgaagtggtggaacgtaaaggtgttcgtcttgccggtctgtatggcgtgaaacgaaccctcgatttaccacacgccgaaccgcttccgcgtatatgctaataaaattctaaatctcctatagttagtcaatgaccttttgcaccgctttgcggtgctttcctggaagaacaaaatgtcatatacaccgatgagtgatctcggacaacaagggttgttcgacatcactcggacactattgcagcagcccgatctggcctcgctgtgtgaggctctttcgcaactggtaaagcgttctgcgctcgccgacaacgcggctattgtgttgtggcaagcgcagactcaacgtgcgtcttattacgcgtcgcgtgaaaaagacacccccattaaatatgaagacgaaactgttctggcacacggtccggtacgcagcattttgtcgcgccctgatacgctgcattgcagttacgaagaattttgtgaaacctggccgcagctggacgcaggtgggctatacccaaaatttggtcactattgcctgatgccactggcggcggaagggcatatttttggtggctgtgaatttattcgttatgacgatcgcccctggagcgaaaaagagttcaatcgtctgcaaacatttacgcagatcgtttctgtcgtcaccgaacaaatccagagccgcgtcgttaacaatgtcgactatgagttgttatgccgggaacgcgataacttccgcatcctggtcgccatcaccaacgcggtgctttcccgcctggatatggacgaactggtcagcgaagtcgccaaagaaatccattactatttcgacattgacgatatcagtatcgtcttacgcagccaccgtaaaaacaaactcaacatctactccactcactatcttgataaacagcatcccgcccacgaacagagcgaagtcgatgaagccggaaccctcaccgaacgcgtgttcaaaagtaaagagatgctgctgatcaatctccacgagcgggacgatttagccccctatgaacgcatgttgttcgacacctggggcaaccagattcaaaccttgtgcctgttaccgctgatgtctggcgacaccatgctgggcgtgctgaaactggcgcaatgcgaagagaaagtgtttaccactaccaatctgaatttactgcgccagattgccgaacgtgtggcaatcgctgtcgataacgccctcgcctatcaggaaatccatcgtctgaaagaacggctggttgatgaaaacctcgccctgaccgagcagctcaacaatgttgatagtgaatttggcgagattattggccgcagcgaagccatgtacagcgtgcttaaacaagttgaaatggtggcgcaaagtgacagtaccgtgctgatcctcggtgaaactggcacgggtaaagagctgattgcccgtgcgatccataatctcagtgggcgtaataatcgccgcatggtcaaaatgaactgcgcggcgatgcctgccggattgctggaaagcgatctgtttggtcatgagcgtggggcttttaccggtgccagcgcccagcgtatcggtcgttttgaactggcggataaaagctccctgttcctcgacgaagtgggcgatatgccactggagttacagccgaagttgctgcgtgtattgcaggaacaggagtttgaacgtctcggcagcaacaaaatcattcagacggacgtgcgtctaatcgccgcgactaaccgcgatctgaaaaaaatggtcgccgaccgtgagttccgtagcgatctctattaccgcctgaacgtattcccgattcacctgccgccactacgcgagcgtccggaagatattccgctgctggcgaaagcctttaccttcaaaattgcccgtcgtctggggcgcaatatcgacagcattcctgccgagacgctgcgcaccttgagcaacatggagtggccgggtaacgtacgcgaactggaaaacgtcattgagcgcgcggtattgctaacacgcggtaacgtgctgcagctgtcattgccagatattgttttaccggaacctgaaacgccgcctgccgcaacggttgtcgccctggagggcgaagatgaatatcagttgattgtgcgcgtgctgaaagaaaccaacggcgtggttgccgggcctaaaggcgctgcgcaacgtctggggctgaaacgcacgaccctgctgtcacggatgaagcggctgggaattgataaatcggcattgatttaactgcaaattgccggacagatctgcctgtccggcatactattcatgaggttttttcggacgatatttttccggcagttctggcaccggacgcttgtcatcgatgagatgacgcacggttaagatcggatgacgccacagcattctcggcccggcccaacgcataatctgtttcatctcttcacgctttgcaggctggtaacagtgcaccggacactgcttacaggctggtttctcttcgccgaacacacatttatccagccgcttttgcgcgtaaacaaacaacgcctcgtaatgctccggctccgctgacgcctgcgggcatttcgcttgataaagatcgatcatttttttaatcgtcagtttttcacgagagatacgcttgccggacatgctgcctccacctcattaagatgtatttatattacatcttaatcttaaagggcactatgactccaaagaagaagggttagccaaccgatacaattttgcgtacttgcttcataagcatcacgcaaaagctgcaaaacagcatctttcccggaaccagcatcaagaactcgccgttcgcttcttcccctgaaatgattaactccggtatcatgtgcgccttatgtgattacaacgaaaataaaaaccatcacaccccatttaatatcagggaaccggacataaccccatgagtgcaatagaaaatttcgacgcccatacgcccatgatgcagcagtatctcaggctgaaagcccagcatcccgagatcctgctgttttaccggatgggtgatttttatgaactgttttatgacgacgcaaaacgcgcgtcgcaactgctggatatttcactgaccaaacgcggtgcttcggcgggagagccgatcccgatggcggggattccctaccatgcggtggaaaactatctcgccaaactggtgaatcagggagagtccgttgccatctgcgaacaaattggcgatccggcgaccagcaaaggtccggttgagcgcaaagttgtgcgtatcgttacgccaggcaccatcagcgatgaagccctgttgcaggagcgtcaggacaacctgctggcggctatctggcaggacagcaaaggtttcggctacgcgacgctggatatcagttccgggcgttttcgcctgagcgaaccggctgaccgcgaaacgatggcggcagaactgcaacgcactaatcctgcggaactgctgtatgcagaagattttgctgaaatgtcgttaattgaaggccgtcgcggcctgcgccgtcgcccgctgtgggagtttgaaatcgacaccgcgcgccagcagttgaatctgcaatttgggacccgcgatctggtcggttttggcgtcgagaacgcgccgcgcggactttgtgctgccggttgtctgttgcagtatgcgaaagatacccaacgtacgactctgccgcatattcgttccatcaccatggaacgtgagcaggacagcatcattatggatgccgcgacgcgtcgtaatctggaaatcacccagaacctggcgggtggtgcggaaaatacgctggcttctgtgctcgactgcaccgtcacgccgatgggcagccgtatgctgaaacgctggctgcatatgccagtgcgcgatacccgcgtgttgcttgagcgccagcaaactattggcgcattgcaggatttcaccgccgggctacagccggtactgcgtcaggtcggcgacctggaacgtattctggcacgtctggctttacgaactgctcgcccacgcgatctggcccgtatgcgccacgctttccagcaactgccggagctgcgtgcgcagttagaaactgtcgatagtgcaccggtacaggcgctacgtgagaagatgggcgagtttgccgagctgcgcgatctgctggagcgagcaatcatcgacacaccgccggtgctggtacgcgacggtggtgttatcgcatcgggctataacgaagagctggatgagtggcgcgcgctggctgacggcgcgaccgattatctggagcgtctggaagtccgcgagcgtgaacgtaccggcctggacacgctgaaagttggctttaatgcggtgcacggctactacattcaaatcagccgtgggcaaagccatctggcacccatcaactacatgcgtcgccagacgctgaaaaacgccgagcgctacatcattccagagctaaaagagtacgaagataaagttctcacctcaaaaggcaaagcactggcactggaaaaacagctttatgaagagctgttcgacctgctgttgccgcatctggaagcgttgcaacagagcgcgagcgcgctggcggaactcgacgtgctggttaacctggcggaacgggcctataccctgaactacacctgcccgaccttcattgataaaccgggcattcgcattaccgaaggtcgccatccggtagttgaacaagtactgaatgagccatttatcgccaacccgctgaatctgtcgccgcagcgccgcatgttgatcatcaccggtccgaacatgggcggtaaaagtacctatatgcgccagaccgcactgattgcgctgatggcctacatcggcagctatgtaccggcacaaaaagtcgagattggacctatcgatcgcatctttacccgcgtaggcgcggcagatgacctggcgtccgggcgctcaacctttatggtggagatgactgaaaccgccaatattttacataacgccaccgaatacagtctggtgttaatggatgagatcgggcgtggaacgtccacctacgatggtctgtcgctggcgtgggcgtgcgcggaaaatctggcgaataagattaaggcattgacgttatttgctacccactatttcgagctgacccagttaccggagaaaatggaaggcgtcgctaacgtgcatctcgatgcactggagcacggcgacaccattgcctttatgcacagcgtgcaggatggcgcggcgagcaaaagctacggcctggcggttgcagctctggcaggcgtgccaaaagaggttattaagcgcgcacggcaaaagctgcgtgagctggaaagcatttcgccgaacgccgccgctacgcaagtggatggtacgcaaatgtctttgctgtcagtaccagaagaaacttcgcctgcggtcgaagctctggaaaatcttgatccggattcactcaccccgcgtcaggcgctggagtggatttatcgcttgaagagcctggtgtaataacaattcccgatagtcttttgctatcgggaatattaacgacaactgacgaataaaataaaaacaccctgtataataggaaagcttattttacagggtaaaaccatgccatctacacgctatcaaaaaatcaatgcccatcactatcgccatatatgggtcgttggtgatattcatggtgaatatcagttattacaatcccgcttacatcaactctcttttttccccaaaatcgacttacttatttctgtcggcgataatattgatcgtggaccggagagtcttgacgtcctgcgcctgctaaaccaaccctggtttacgtcggttaaaggcaaccacgaagcgatggcgcttgaggcattcgaaactggcgatggcaatatgtggcttgccagcggtggtgactggtttttcgatttaaatgattcagagcaacaagaggcaatagatctgttgctgaaattccatcaccttccacatattattgaaatcactaacgacaacataaaatatgccatcgcacatgcagattatccggggagtgaatatctctttggtaaagaaatagcggagagcgaattactctggcctgttgatcgtgtgcagaaatcgcttaatggcgagttacaacaaataaacggcgctgattattttatatttggacatatgatgtttgataacattcagacgttcgctaaccagatttatattgataccggatcgccgaacagcgggcggctgtcattttataaaataaagtagtctcatgcttcttctgtgaagcatgagtaacccggtgttattgcaggccattattcatttttcgctaccagcaaagagagatcctgcttcaccagcgcgcgactggcactctccggcaaaccgtcgtctgtaataatctgatcaaactcgcttaatggtaacgccagccatgtcgccacctgaccatatttcgtcgcatcacagaccaaaactcgctggcggctggcactggcaatcgcccgtttcaccgtgactttatcttccgctggcgtagaaatcccccgcacactccatgacgatgcagaaataaaagcctgatcaatcatcaggctgcgcagcatggtcgcagcggcttccccgacacaggaacggttttcccgacacactgcaccgccagtgtgaataattgtgcaattactgttgtcgagcaagtagtccgcaataacgaaatcgtttgtgaccacagtcagtgactccatgtgaatcagatgctgtgctatcgctaacgtggtcgttcccgcatccagatagatacaacttcccggctgaacaagacttgccgccagcttgccaatagccgctttttgcgtcattgccagcgcagtttttacctgatgagaaggttcatgcgccacgcgtcccggagactggacgcctccggacaccagcacaacggctccctgctgctccagtttttgtaaatcccgacgaatggtcatatgtgacacattcattctgtccgttagttcagcaatactgacaatgcctttttcagctaccatctcaaggatgatttggcgacgctctacgggtatcaacttttgctccttcctttgtcctgctgacattctacgctatttgcctgcgaaacgtgcgcggcgcaactaacgcttagttcacataaaataacacacaatgttaatttatgtgaatcagatcaccataccgttatcttccagcgcttatattcacaatatcaaacaaaatatcacttaaattaacaaggagagcagatgaaaacgggatctgagtttcatgtcggtatcgttggcttagggtcaatgggaatgggagcagcactgtcatatgtccgcgcaggtctttctacctggggcgcagacctgaacagcaatgcctgcgctacgttgaaagaggcaggtgcttgcggggtttctgataacgccgcgacgtttgccgaaaaactggacgcactgctggtgctggtggtcaatgcggcccaggttaaacaggtgctgtttggtgaaacaggcgttgcacaacatctgaaacccggtacggcagtaatggtttcttccactatcgctagtgctgatgcgcaagaaattgctaccgctctggctggattcgatctggaaatgctggatgcgccagtttctggtggtgcagtaaaagccgctaacggtgaaatgactgtcatggcctccggtagcgatattgcctttgaacgactggcacccgtgctggaagccgttgccggaaaagtttatcgcataggtgcagaaccgggactaggttcgaccgtaaaaattattcaccagttgttagcgggcgtacatattgctgccggagccgaagcgatggcacttgcagcccgtgcggggatcccgctggatgtgatgtatgacgtcgtgaccaatgccgccggaaattcctggatgttcgaaaaccggatgcgtcatgtggtggatggcgattacaccccgcattcagccgtcgatatttttgttaaggatcttggtctggttgccgatacagccaaagccctgcacttcccgctgccattggcctcaacagcattgaatatgttcaccagcgccagtaacgcgggttacgggaaagaagacgatagcgcagttatcaagattttctctggcatcactctaccgggagcgaaatcatgatcaagattggcgttatcgccgatgattttaccggcgcgacggatatcgccagttttctggtggaaaacggtctaccaacggtacaaattaacggtgttccaacaggtaaaatgccggaagcaatcgacgcactggtgatcagcctgaaaacgcgctcctgtccagtggttgaagccacacagcaatcgctggcggctctgagctggttgcaacagcaaggttgcaaacagatctatttcaaatactgctctactttcgacagtacggcgaaaggtaatattggcccggttaccgatgccttaatggatgctctcgacacgccgtttacggtcttctctccggccctgccggtcaacggacgtacggtttatcaggggtatttgttcgtaatgaatcaactgctggccgaatccgggatgcgccatcacccggtaaatcccatgaccgacagctatcttccccgtctggttgaagcgcaatccacagggcgctgcggcgtcgtttcggcacatgttttcgaacaaggtgtggatgccgttcgtcaagagctggctcgcttacagcaagagggctaccgctacgcggtgcttgatgcgctgaccgaacaccatctggaaattcagggagaagccttgcgcgatgccccactggtaacgggcggttctggtctggcgattggcctggcccggcagtgggcgcaagaaaacggtaaccaggctcgcaaagcagggcgtccgctcgctgggcgcggcgtagtgctctccggttcatgctctcaaatgaccaaccgccaggtagcacattaccgtcaaattgcaccagcccgtgaagttgatgtggcacgctgcctctcaattgaaactctggccgcttatgcacacgaactggcagagtgggttctgggccaggaaagtgtacttgctccactggtttttgccaccgccagcactgacgcattggcagcaattcaacagcaatacggtgcacaaaaagccagtcaggcagtagaaacactgttttctcaactagcggcgcggttagcagcggaaggcgtgacacgctttattgtcgcaggcggtgagacctccggcgtagtcacacagagcctgggaataaaagggtttcatattggcccaaccatttccccggcgtgccgtgggtaaacgcactggataagcctgtctcactcgcccttaaatctggcaacttcggtgatgacgcctttttttcacgagcccaaagagagtttttatcatgagcgatttcgcaaaagtagagcagtctttgcgagaggagatgacgcggattgccagttcattctttcagcgcggctatgcaaccggttcggctggcaatctgtcgctgcttttacctgacgggaatttactggcgacaccgacaggttcatgcctgggcaatctcgatccgcagcggctttccaaagtcgccgcggatggcgaatggttaagtggtgacaaaccctcgaaagaggtgctctttcatctggcgctgtatcgcaacaatccgcgctgtaaagcggtggtgcatttgcacagcacatggtcgacggcgctttcctgcctgcaagggctggacagcagcaacgttattcgtccgttcacaccatacgtggtgatgcggatgggaaatgtcccgctggtgccttattaccgaccgggcgataaacgcatcgcacaggatctggcggaactggcagcagacaatcaggcttttttactggcaaatcatggcccagtggtttgcggtgaaagcctgcaagaagccgccaacaatatggaagagctggaggaaacggcaaagctgatttttattctcggtgaccgcccgatccgttatctgaccgcaggtgaaattgcggaattaaggagttaatgcaatgcctcgttttgcagctaatttatccatgatgttcaccgaagtgccttttattgaacgcttcgccgcagcgcgaaaagccgggttcgatgctgtggaatttctgtttccctataactactccaccctgcaaatccaaaagcaactggagcaaaaccatctgacactggcgctgttcaataccgctcccggagatattaatgcgggggaatggggattatccgcccttcccggacgtgagcacgaagcacacgcagacatcgacctggcactggaatatgcattggcgctcaattgtgaacaagtccatgtgatggcaggcgtcgtgcccgctggcgaagatgctgaacggtaccgggcagtatttatcgataatatccgctacgctgccgaccgctttgcgccacacggcaagcgaatattagttgaagcactcagccccggcgttaagcctcattatctcttctccagccagtatcaggcactggctattgttgaagaggttgcgcgagataacgtgtttattcaactagatacttttcatgcgcaaaaagtagatggcaacctgacgcatttaatccgcgactacgccgggaaatatgcgcacgtacaaattgccggactacctgatcgacatgaaccggacgatggagaaatcaactatccgtggctgttccgcctgttcgatgaggtgggatatcagggctggatcggttgtgaatataaacctcgtggcctcaccgaagaagggcttggctggtttgacgcctggcgctaattcgttaaatccctaattacaacgtacccatacatccccccatctacggatggggtaggttaactataactttcagacagggtttcccatgtccacaattacattgttatgcattgcgttagctggcgtaatcatgctgttgctgctggtcatcaaggcaaaggtacaaccattcgttgctttgctcctcgtcagcctgttagtcgcacttgcggcaggtataccggcgggcgaagtgggtaaagtgatgatcgccgggatgggcggtgtgcttggttccgtcactattattattggtctgggcgctatgctggggcgtatgatcgaacactctggtggtgcagagtcactggctaattatttcagtcgcaagttaggtgacaaacgaactatcgctgcgctgactctggcagcgttcttcctcggtattcccgtcttctttgatgtcggctttattattcttgcgccaatcatttacggttttgccaaggttgccaaaatatcgccactcaaatttggcctgcctgtcgctgggatcatgctcactgttcacgtggcggtaccgccgcatccaggccctgtcgccgcagcggggttactccacgcagacatcggctggctaaccatcatcggtattgcgatttctattcccgtaggggttgttggctactttgcagcgaaaataatcaataagcgccaatatgcgatgtcagtagaagtactggaacagatgcaactggctccggccagtgaggaaggcgcgacaaaattaagcgataaaataaatccaccgggcgtcgcgctggtcacctcgctaattgttattcctatcgcgattatcatggcgggtacggtttccgcaacactgatgccgccttcgcatcccctgcttggtacgctacagctgatcggctcaccaatggtagctctaatgattgcgctggtgctggcattctggttattggctttacgtcgcggctggagcttacaacacaccagcgacattatgggctcagcgcttcctactgcggcggtagtgattttggttactggtgctggaggggtatttggcaaagtgctggtggaatcgggcgtcggcaaagcccttgccaacatgctacaaatgattgacctgcctctgttaccagccgcatttattatttcactggcgctgcgtgcatcgcaggggtcagcaaccgtagcaatactgacaaccggcgggttactctcagaagcggtgatgggattgaatccgattcagtgcgtattggtgacgctggcagcctgctttggtgggcttggtgcgtcacatattaatgactcagggttctggattgtgaccaaatatctggggttgtcggtagcagacggtctgaaaacctggacagtgttaacgaccattctcggttttaccggattcttaattacctggtgcgtatgggcggtaatttgaccttaataaaaaggtccgatgggcatcggaccttttattgtgcacagaaaaggccagcctcgcttgagactggcctttctgacagatgcttacttactcgcggaacagcgcttcgatattcagcccctgcgtttgcaggatttcgcgcaaacggcgcaggccttcaacctgaatctggcgaacacgttcacgggtgaggccaatttcacgacctacatcttccagtgttgccgcttcgtaccccagcaaaccgaatcgacgtgccagcacttcacgctgtttggcgttcagctcgaacagccatttgacgatgctctgcttcatatcgtcatcttgcgtggtatcttccggaccgttctctttttcatcggccaggatgtccagcaacgctttttcggaatcaccacccagcggggtgtctaccgaggtaatgcgctcgttaagacgaagcatacggctgacgtcatcaactggcttatccagttgctctgcgatctcttccgcacttggttcatggtccagcttatgggacaactcacgtgcggttcgcaggtaaacgttcagctcctttacgatgtgaatcggcaaacgaatagtacgggtttggttcataatcgcccgttcaatcgtctggcgaatccaccaggttgcgtatgttgagaagcggaaaccacgttccgggtcaaacttctctaccgcgcggatcagccccaggttgccctcttcgataaggtccagcaacgccagaccacgattgccataacggcgggcaatttttaccaccagacgcaagttactctcgatcatccggcggcgagaggcgacatctccacgcagtgcgcgacgcgcaaaataaacttcttcttcggccgttaacagtggtgaataaccaatctcaccaaggtaaagctgagtcgcgtccaacacacgctgtgtggctccctgcgataacagttcctcttcggccaaatcgttatcactgggttcctattctactaaggccttttcgtcaaaaacctcaactccgttctcatcaaattccgcatcttcatttaaatcatgaactttcagcgtattctgactcataaggtggctcctacccgtgatcccttgacggaacattcaagcaaaagcctggttccgccgatttatcgctgcggcaaataacgcagcgggtttacggatttccccttgtaacgaatttcaaaatgcaagcgtgttgaactggttccggtgctacccatggtcgctattttttgccccgccttaacttcttgttgttcccggaccagcattgtgtcgttatgggcgtaggcactcaggtaatcatcattatgtttgatgataatcagattaccgtagccgcgcagcgcgttaccagcataaacaacgcggccatctgcggtcgcgataattgcctgtcctttgctgcctgcgatatcaatccccttgttgcccccctcagaagcgccaaaggtttcgatcactttgccctcagtcggccagcgccaggtggagataggcgtactggttgatgtactgctgacagtcggctcggttgtgcttgctgttggtaccgttacaggcgctgtgaccgtggtcgcagttggcttgttgttcggcaacattttgttagcactctgttcacccgaagactcagaatacgtaattgtcggttgcgacgcaacagcaacggtggaattttgtgcaggcttgatcacaactccttgctctgctgcgtcggcctgggtaatggcatttccgccagtgattggcgtaccggaagcattacccacctgcaaggtctgaccaacgttcagcgcgtatggtgcctgaatattgttgcgctgagcaaggtcacggaaatcgttgccagtaatccaggcgatatagaaaagtgtgtcgccttttttcacggtataggtactgccgctataactgcctttcggaatgttcccatactgacggttatagacgatgcgtccgttttccatctgtaccggctgctgagctactggctgcactggctggatttgcggttgttgagtagcctgaatttgtggctgctgcaccggctgaatttgcggttgctgcgctgtagacgtcgtccccattttcggcggcggcgtaatcaacataccagaattagtatttgcaggcgcattgccattaacggagctgaccggtgccggtggatttgaagtgtcagaacagcctgccagccatagcgaaaccagtgacaaagccgcaatgcggcgaacggtgaattttgggcttcccgcgctcatttatcccccaggaaaaattggttaataaccagtgacataattaccgtgcaaggcaccctactgaacactggaaaagatgttcacgatacgctgacctgcggcaaaataaccaggaaaaatccaggtatttcctcacgttttaagccagctcacccttcactaaagggacaaagcgcacggcctccacggtatcgataataaattcgcctccccgacgacgcacccgtttcaaatactggtgctcctcccctacgggtaagacgagaatcccgccttcgtccagctgcgtcattagcgcagttggaatttccggcggtgccgccgtaacaatgatagcgtcaaacggcgcacgtgcctgccaaccttgccatccatcgccatgacgggttgaaacattatgtaaatcaagatttttcaggcggcgacgtgcctgccactgcaagcctttaatccgttcaaccgagcaaacatgctggacaagatgcgccaggattgccgtttgatatcccgaaccggtgccaatttccagcacccgcgactgcggcgtcagctcgagtaattcggtcattcgcgccaccatatatggctgcgaaattgtctgcccctgacctatcggcaaagcgatattgtcccaggctttttgttcaaacgcttcatcaacgaatttttcacgcggcacggcggcaagtgcattcagcacctgctcatcctgaataccttgcgcacgtaattgatccagaagtgcttgtacgcgtctgcttaccattgcgtgccaactcccacgctgtttaaccagtctgaaaccacatcttgcgcgctatgcgcagttaaatccacatgcagcggcgtgatggagacatagccctcatctaccgcagcaaaatcggtccccggaccagcatcacatttaccgcccggcgggccaatccagtacagcgtattgccgcgcggatcttgctgcgggatcacctgatctgccggatgtcgtgtaccgcagcgcgtcacgcgaatacctttgatttgatccaagggtaaatccggaacgttaatattaagaatacgcccggtgcgcagcggctctttacacagtgcgcgcaaaattgaacaggttaccgccgcggcagtgtcgtaatgtttatgcccgtcaagcgagacggcaagcgccggaaaacctaaatgacggccttccatcgcggcggctaccgtaccggaataaataacatcatcccccagattcggcccggcgttaattccggacacaacaatgtccgggcgcggacgcatcagagcattcacgccaagatagacgcaatcggtcggggttcccatttgcacagcaatatcaccattttcaaaggtaaacgtgcgcagggaggattccagtgtcagagaatttgaagcgccgctgcggttacgatcgggggcgaccacctgaacgtcagcaaactcacgcaaggctttcgccagcgtttgtataccgggtgcatgtaccccgtcatcattactcagcaatatgcgcataatcacctgttgtgttgataagttccctgacaacgctggttgcaaaactacccgccggaagccagaaacggatctctacggtgacgtcatcccaccaattccagcttaattgttgcggatacagcagcatcgctctgcgcgcggcttcaactttttcgcgcaccagtaaagcttgtaattcagtttctgcggcgacagctgcttgttcgaatgccagcgcttcacgctgagttccccattcgccactgcctggcaatgcggcggttatcatcaactctttatcgttgacgcgacgctgtaattccgccagttcttcggtggttgcgacaaaccagctaccacgtccggctaattgtagcgcatcgccgtcaacaacttgattaacgtctgcttttttgaggcgctcagcaacaatctgattaaacaacgcactgcgggctgccgacaaccaaaaactccgtttattgcgatcgcgcaccggagtattggtttgcgcccagcgctgcgccccctgcaagttgctaccgccaatcccaaaacgttgggcaccgaagtagttcggtacaccttttacgcaaatatcgatcagacgttgttcaacgtcatcgcgattgctcacttcgcgcagaaccagggtaaaggcgttacctttcagcgcgcctaaacgcagcttgcgcttgtgccgcgcatactccagcacctggcagccttccagttgaaaggcgctcagatcgggcatttccttgcccggcacgcgagcgcataaccactgttccgtaacagcatgtttgtctttttgcccagcgaagctgacttcacgggcatgaattttcaggaatttcgccagtgcatccgccacaaaacgggtattgcagccgtttttgaggattctaaccagaatatgctcaccttcaccatcaggctcaaagcccaaatcttccaccaccacaaagtcttccggattggctttcagcagcccggtgccttgcggtttaccgtggaggtaagtgagattatcaaactcaatcattttgttgccttaatgagtagcgccaccgcttcacaggcaatcccttccccacgtccggtaaatcccagtttttccgtagtagtggctttcacgttaacatcatccatatggcagccgagatcttcggcaataaacacgcgcatttgtggaatgtgcggcaacatcttcggtgcctgagcgatgatagtgacatcgacgttgccaagggtataacccttcgcctgaatacgacgccaggcttcgcgtagcagctcgcggctatcggcacctttaaatgccggatcggtatccgggaacagcttgccgatatcccccagcgccgccgcgccaagcaatgcatcggtcaacgcatggagcgccacgtcgccatcagaatgcgccagcaatcctttttcgtaaggaatgcgtacgccaccaatgataattgggccttcaccgccaaaggcatgtacgtcaaaaccgtgtccaattcgcattatgtattctcctgatggatggttcgggtgaggtaaaactcggccagtgccaaatcttccgggcgcgtgactttaatgttatccgcacggccttcgaccaactgaggatggaatccgcaatattccagcgccgaggcttcgtcggtaatagtcgcgccttcatttagagcgcgcgtcagacagtcatgtaacagctcacgagggaaaaattgcggcgtcagcgcgtgccataagccgttgcgatcaacggtatgagcaatggcatttttgcccggttcggcacgtttcatagtatcgcgcactggtgcggcgaggatcccccccgtgcggctggtttcgctcaacgccaacaatcgcgcgaggtcatcctgatgcaaacaaggacgagcggcgtcatgcaccaatacccactgcgcgtcgccagcggctttcagacctgccagcacggaatcggcacgctcatcaccgccatctacaacggtgatttgcggatgattcgccagaggaagttgtgcaaaacggctatcgccaggacttatggcaatgacgacacgtttcacccggggatgcgccagcagcgcatgcaccgagtgttcaagaatggtttgattaccgattgagagatattgcttaggacattccgtttgcattcgacggccaaatccggccgccggaaccacggcgcaaacatccaaatgagtggttgccatgttaattcccgggctgatttatcgattgttttgccccgcagactgtgcgcgcttcgacgcgtcaggcaccagacgataaaaagtttcgcccggcctggtcatgctgagttcattacgcgcacgctcttcgagcgcctcctggccgccattgagatcgtcaatttcggcaaaaagttgatcgtttcgcgctttaagtttcgcgtttgtagcttgctgtgccgccacatcatcattgacgcgggtatagtcatgtataccgttcttaccgaaccacagcgaatactgtagccagaccagaatagccagcaacagcagcgttagtttacccatcctgccccctgaaaaacggcatcatcatcccatgcatccgaagacgactctacatcctctgttggggataccgcgacaacgcgggcaaatgtaccacatttgtccattgttacgtatacccagggcgtgcagaacataatctcattattagttacggtttgaattatgaacagaggagacgggaaagtacaaattagcccagtagccacataaacagtgcgccaaacataatgcctactgtcaccagggtgaaaacaatactgtagcgtagctttccgtccatcaatgaatgcagcgcaatccccaccactaccgcgacgggcatcagcgccagaaagaaaggccaggtgtagataaagaagaacagcgtgttagagccataaatcaacatcggcatcgccagcgcaaataaccaggagataaaaccgaccacggcaccaggcagtgaccatgtggtttcttcatcctcagtaaggctgtcgttatttgttagtgtaatgttatggctattacgcatatttgatcctgttactttgacgaaccgggcatggaaacccggtggtgtctcaggatctgataatatcgttctgtctcaacagatctaataattgctgtaccaaatttgttactaattgttcaccattgagatgaatttctgccgattcaggcgcttcgtaaacggaatctattcccgtaaagttgcgcagttcaccggcacgcgctttcttatataagcctttgggatcgcgggcttcgcaaatcgccagcggcgtatcgacaaacacttcgataaagcgcccttctcctacgcgttcgcgaaccatctggcgttcggcgcggtgtggcgagataaatgcggtcagcaccaccagtccggcttcaaccatcaaattcgccacttcaccgacgcgacggatattctctttacgatcggcatcgctaaaaccgagatcgctgcataatccgtggcgaacattgtcgccatccagcagatacgtactgacgccgagtttatgtaacgcctcctccagcgccccggcgaccgttgatttaccggacccggagaggccggtaaaccacagcactacaccacgatgaccgtggtgtagctcgcgttgttgcacagtgaccggatggctatgccagacgacgttttcgtcatgcagcgccattatttatcccccagcaaatcgcgcgcgccccagtgcggaaagtggcgacgaaccagagcattcaattccagttcgaatgcactgaattcagatggcgcagcagttgcctggctaactggctcgtgcaccataccggcacccacggtcacattgctcaggcgatcgataaaaatcagcccacccgtcaccggattttgttgataacgatctaacaccagcggctcgtcaaaagtgagatccacgaggccgatcccattcagtggcaggttttcaacttcacgctgggtaaggttattaatatcaacctgatagcgaatgccatcaacacgcgcgcgcgtcttcttaccggcaattttgatgtcgtaactctgccctggagaaagcggctgttccgccatccataccacatccaccgacgcgctctgcaccgccggtaacgcttcgtctgccgccagcagcagatcgccacggctgatgtcgatctcatccgtcagcaccagggtgatcgcttctccggcaaaggcttcttcgcgatcaccatcaaaagtcacgatccgcgcgacgtttgattccacaccagagggcagcactttgacacgttgcccgacttccacgcgaccggatgccagcgttccggcgtaaccacgaaaatcgagattcgggcgattaacgtactgcaccgggaagcgcattggctgagcatccaccactcgctggatctccacggtttccagcacttcgagcagtgtcggaccgctgtaccacggcatactttcactttgcgatgccacgttgtcgccttccagtgcagagagcggcacaaagcggatatccagattacccggcagctgcccggcaaaggtcaaataatcttcacgaatacgggtgaacgtctcttcactgtaatccaccagatccattttgttgatcgccacgaccagatgtttgatccccaacagtgtggagataaaactgtgacgacgggtttgatcgagcacgcctttacgggcatcgatcagtaagatcgccagttcacatgtcgatgcgccagtcgccatattgcgggtgtactgctcgtgccctggggtgtcggcgataataaatttacgcttctcggtagagaaatagcggtaggccacgtcaatggtgatgccctgttcgcgctcagcttgcaggccgtccaccagcagagccagatccagcttttcgccctgggtgccgtgacgcttactgtcgttatgcagcgatgagagctgatcttcgtagatttggcgggtatcgtgcagcagacgaccaatcagagtacttttgccgtcatcgacgctaccacaggtcagaaaacgcagcaggcttttatgttgttgcgcaatcatccaggcttcgacgccgccttcattggcgatttgttgtgcaagtgcggtgttcatcttaaaaatacccctgacgttttttcagctccatagaccccgcctggtcgcggtcaatcacgcggccctgacgttcactggtggtggaaaccagcatctcttcgatgatttccggcagtgtttgtgcatttgactccaccgcaccggtcagcggccagcagcccagcgtacggaaacgcaccatccgttttttaatcacttcgcccggttgcaggtcgatacggttgtcatcaatcatcatcaacataccgtcgcgttccagaaccggacgttccgcagcgagatatagcggaacaatgtcgatattttccagccagatgtattgccagatatcctgctcggtccagttagagagcgggaagacgcggatgctttcgcctttgttaatttgcccgttgtagttgtgccacagctccgggcgctgatttttcggatcccagcgatggaagcggtcacggaaagagtaaattcgctctttagcgcgggatttctcttcgtcacggcgcgcaccaccgaaggcggcatcaaaaccgtatttgttcagcgcctgtttcaggccttcagttttcataatatcggtatgtttcgcgctgccgtgcacgaatggattaatccccatcgccacgccttccgggtttttatgcaccagcagttcgcagccgtaggctttagcagtacgatcgcggaactcatacatctcgcggaatttccagccggtatcgacatgcagcaacgggaaaggcagcgtacctggataaaacgccttgcgcgccagatgcagcatgacgctggaatctttaccgatagagtagagcatcaccggatttgagaattctgccgccacctcgcgaataatgtggatgctttccgcctccagttgccgcaggtgagtaagtcgtatttgatccataaccgttcctttgcaataccgctattttcttgccatcagatgtttcgactatagggagcgtaagagaacgaatgaaattaccaattagaatgagtagttccttaacggaataacgatttggcaaagctaatatcaaaaagtgcttaaggcaccggatttcgggcgtttaggaagatttgaaattgttttagcgcagcggcagtttcatactatggcggtaaaaaaatttgcatggtatttaaggactcactatgttttccgcattgcgccaccgtaccgctgccctggcgctcggcgtatgctttattctccccgtacacgcctcgtcacctaaacctggcgattttgctaatactcaggcacgacatattgctactttctttccgggacgcatgaccggaactcctgcagaaatgttatctgccgattatattcgccaacagtttcagcaaatgggttatcgcagtgatattcggacatttaatagtcggtatatttataccgcccgcgataatcgtaagagctggcataacgtgacgggaagtacggtgattgccgctcatgaaggcaaagcgccgcagcagatcatcattatggcgcatctggatacttacgccccgctgagcgatgctgacgccgatgccaatctcggcgggctgacgttacaaggaatggatgataacgccgcaggtttaggtgtcatgctggaattggcagaacgcctgaaaaatacgcctaccgagtatggtattcgatttgtggcgaccagcggcgaagaggaagggaaattaggcgctgagaatttactcaagcggatgagtgacaccgaaaagaaaaatacgctgctggtgattaatctcgataacttaattgttggcgataaattgtatttcaacagcggtgtaaaaacccctgaggcagtaaggaaattaacgcgcgacagggcgctggcaattgcgcgcagtcacggaatagccgcaacgaccaatccgggtttgaataaaaattatccgaaaggcactgggtgttgtaatgacgcagaaatattcgacaaagcgggcattgctgtactttcggtggaagcgactaactggaatcttgggaataaggatggttatcagcaacgcgcaaaaacacctgccttcccggcgggaaatagctggcatgacgtaagactggataatcaccaacatattgataaggctcttcctggaagaatagaacgtcgctgccgtgacgttatgcggataatgctacctctggtgaaggagttggcgaaggcgtcttgatgggtttgaaaatgggagctgggagttctaccgcagaggcgggggaactccaagtgatatccatcatcgcatccagtgcgcccggtttatccccgctgatgcggggaacaccagcgtcaggcgtgaaatctcaccgtcgttgccggtttatccctgctggcgcggggaactctcggttcaggcgttgcaaacctggctaccgggcggtttatccccgctaacgcggggaactcgtagtccatcattccacctatgtctgaactcccggtttatccccgctggcgcggggaactcccgggggataatgtttacggtcatgcgccccccggtttatccccgctggcgcggggaactctgggcggcttgccttgcagccagctccagcagcggtttatccccgctggcgcggggaactcaagctggctggcaatctctttcggggtgagtccggtttatccccgctggcgcggggaactctagtttccgtatctccggatttataaagctgacggtttatccccgctggcgcggggaactcgcaggcggcgacgcgcagggtatgcgcgattcgcggtttatccccgctggcgcggggaactcgcgaccgctcagaaattccagacccgatccaaacggtttatccccgctggcgcggggaactctcaacattatcaattacaaccgacagggagcccggtttatccccgctggcgcggggaactcagcgtgttcggcatcacctttggcttcggctgcggtttatccccgctggcgcggggaactctgcgtgagcgtatcgccgcgcgtctgcgaaagcggtttatccccgctggcgcggggaactctctaaaagtatacatttgttcttaaagcattttttcccataaaaacaacccaccaaccttaatgtaacatttccttattattaaagatcagctaattctttgttttcaaacaggtaaaaaagacaccaaccttaaaccatccaaatctaccggggtacgcctgtttaacccaaatgtctggaactcaaatcccgtttccgtattcgttgcccatgccatcactacattgccttcttccgccagtccagctatttgttcccagatcatttcacgaatttttgcggatacatcacctacatatacccctgcacgtacctccaacaaccagatggctaatctgcctcgtaagcgcggaggtacattttcagtgaccacgaccaacatactcatttcagctactccgatggcctgcatctcccagtgaaacaggaagcggaatggcaacaggctgtgcatcttcaggtggggccggcggttgtatttctccagcggcaagcacgtcctctataagcggaatcaatttggctaatgttttactactgcgaaaaatatccctgcacgccaaacggacttcccggtccggctcaccagggttacgacgcgctatctcaaaagctttcggtacaacagtgtcaaatttaatgatgtctgcaatatcgtaaacaaaggaaagaggctttcctgtatgcacaaacccaatagctggtgcataaccagctgcaagtatcgccgcttcagttacgccgtataaacaggaagttgcagcgctaatgcattggttgatcgtatcgcccttttcccagtctttcggatcgtagcgacgtccattccatgtcacgccgtattgcttcgccagaagtgcgtaggttgcccgcacgcgactgccttctatacctctgagttgctctacggagcgccgggcaggcgcaggttctccaaaccgaagttcaaacattttacgtacgaccttcagacgcaaatcttcatccagagcaagttttgcctgatagagcagcttatctgaacgcgcacctccaggctgaccagaagcataaacacgaacgcccgcttcccccacccataccaacaatgttccaacttgcgcagccaggcgtacagctgcatgcgaaacccgtgtaccaggttccagcatgatgcaggcaaccgagccaacaggaatatgagtgcggatccctgtcttgtcgataagtacaaacgcgccatctattacatcgatctgcccatattgcagaaagatcatggagacgcgatctttgagtggaatgggattaaggggaagccaggtcattttattacacctcaatcacagtggagccaaagatagcaagccacatcccatcgatttagctggcccaataccttgctgtacaagatctattaacgctggcgcgtcgttgatggtgagcacaccttcaaagcaaaccgtttggatctttccacttttaccatcaccagaaaaatactgtggccgttccgatatgggatgcacatcttcaacgcgcgccgcattgcccaatttacgttgcaaccacgcgatttgttctgcttcttttattaacggaacccgacagcgtttaatattccctttactgtccaggcgcttttgattgtcgagaatagttttgatcggatttgcccgaagccgaaaatagagtggaacaccaacctgaagttgaaattcaacctgtttagttttaatgactgtcgcaacggcagttgaaacaggcatttgcgctgactgcaataaaacatgacagccttctggtgtgtttcgcttctcaacatgaaaaagaaaatcacgagcagcatccggtctgtttggaaataaatgccataatccctggtgaagttggtaaagatccctgctccaggccctggcaatgatgactttactgagatacatccatacctcctttaatcacataccattctcgggaagcaaattgtcgaggcaaggtgatcatcggttcgtcgcgcgccgtaaattttaaatgatgccctgtaactgattcctcactatatatatcgccgccaacgggctcataatttaatagcgccttctgaggatccgatgcctgacatgtccccaaaaaaagcgggtgtgttagtgggcaacttctccgccccaggtaaggtgtataccgaggctttaatactgctttttcaagttctgagataaccatcgttgcatggggtgttaaccagagagcgacggtaaaggaggcatcacataaatattcgcgccatgtttgaatcgtttcatgacttttcaaaccacggtaatcttctcgcgctccaaggactgtatggtaatcacgcaaccccgttacagacacacgacgatcgtcaagaatgagttcatcgcagcgcactgcaaattgcacactctctgataacgcctgtaatgaagaagtatcatcacgttggatcccaagacaagccccgagtagccctaataacccgcttcgggtcggaaatcttccggtaggtcgcgttccttcaaaggtcggctgcccccaggcttgcattggcccagcaagccgcaagatcaaataagatctcatgttcacgcctcgccattattacgaacccaggattttaactgttctaaagtaggcatttgtttaacttgagcagtaattgggtctacatcagataagctgaattgcgcagcagctccgttcagaccatatccattggcaacgcgatcccaatattgattaaacgcctgtatagacggttgcaaaaagccatctttcgctttaaccgctttttcaaaagcatttgccatagaaagtggcatatcggagaaattaaccattaccatatccgcagggttaaaagcggcataagtacgctgttttgctccagggacctctgttgccagcatatgaacaacatgggttgcaatttccagagcctgctccctggaggcaccacctaaattttcctgaagttgagcgaggttaatgttggcataacgataaaaaacacccgatgaaaattcctgagttcccagatgtgcagaaccttgttcctgtaaatcatctacagcggtgaaccagtcaatatcagaatcaacctgatgagtagtgatcgcatgcgcaatggacattgcaccatcaacttttcccaactcagtcatcatgccgctggttgccattcttccactaagcgcaatatcaacaccctgctgtaaattcacacgtatggcggcaatatcttccttaagaactttgagcagctttttatcatccagattatcagcctctgcttttgcaacctgctcacagaaccaggctatttctcccacaacccagggagtaaccgcatcggcagaaatcttttcggcttcatcaactgatttaccggagagcagcgctaatgtcttatcgatgattttttggtcaaaacgttcaccaagtttttgccgaagaacatcacgtaattgtgcaagatgaatggttctgagactggattcaccaatattttgtgcgtaataaccacttttacgcatcgcacgtttaaggctttgacttgaaattcttactcgtcttttgccgccgaaaatagcgtctttctgcatgttcatatcgtcgcggttcagacatgaagggctgtgagagatcagaacatgaatattgataaagttagacatagaaaggtttccttacgcatttttgtttgtggtcaatacaaaatcttccagaagttgctggcgttcgcgctttccccaccaggtcaacatcctggccattaatggccagtcaagtacgggttcggcgtgagtaagtaatcgacgtaactggaccatatcggctgttctgtcagcccgaattaattgaaagatacggcgctcgttaattcttccactattggctaaagctcttcccaacgagatacctgttgtttgctccgattttttgtcctgatgtcggatgacattctttcctgcgctcaggcaaaacaccatgcgcaaaagagcctgctggtgacgtgggttttcccaaccaaaaggttgcaccagcctataaaacgcagggatatcgcgtaattcatcaggttctgaaacacgtctaatttgcgcacatgatccattatccagttgttgccaggctcgatataaagccattgcatcaatttcatcagccatttgatggccctccttgcggttttaactcccgtaaatgtttgtatagcgtggcgcgggcaagcgctaatgtgcttattaatttaggatgatgtgcatagggagctacagattgattaaatagcatttcacacaattgatgaagtttgtctcgtaaatcagctattacctcatcagcctgggaaaaattaacattcgccagtacatcgggaattaataattcactctgtcgatagaaatgcctttctgcagtctcatgaacagagactccggcccctttgaagtctttatttttaaacccttctgcaaaggtatataacgccttgcgtaaggctgttttatatcccaaaccaacagtcactatttcgtttatcacattgccgtattgttgccacccctgattaaacatcaacacatcatgacgccgttcaagaatagatgcttgattattacgatatccccccataatcaattcaagaggactttgcggcgcaatatttctgaattgattcacaaccgccgccacgcgatttccattttcattttgaataatcttatctaccacaactcggctgatttgtgtccatgatggtgcggaggtggtgaaagcaagaaatttttcctcaacctcccctttcttgactgttaccagacaaggggaatgcggatggggccatagcccattaactgtaaaggtaaatttttccttaagaaaaccggtataacgcaaattgctttcctgtccacagcaagaacatttaccaatcccaatgggatcgcataattcaatatgcgctggttgccagaatagaccacggacaaacccaattgacgaagcaggtatagactcattggacttgataggtttaatccaggtaggttggttttccgtatgtgattcattaggaaattgtttttgaagacgaggtaatgtgaggacattgagtaacaccgttgaacgaagatcgatcccacgtacgaacgttgttacaggtgttcctccacgtaaaccgcttttaaaaccaccaccaaaacctggtgcctgattcgcctggttgaataacgcaatcgcagtgcatccaccacataatgcttcaccctgccccggttgattgacaaatgcacaattcgtcgcgccgcttaccccagccaacagtttttccattggagtcacatcatttgctttgacacctttggtctgcataaagggatgttctgcgtgattaaggtagaacatatctatccacggcgcgatgagttgttgaaactcatcttcagtgagcggattcattatgcgatgtcgaaattcaacgtcatcttttgccggggcgataatttgcccaatgcaaaccagcagtgctaaagcggccagttccatatcgtcacggggcaaacttaatcgccactgatctctactgcagtatagcgattgcagatttatgatttggactttccccccgtttcgcgggcgtacagggatccagttatcaataagcaaattcatttgttctccttcatatgctccgacatttctcctgcatttctatacgtcggcacacttccgttatcggtaaaaacaaagaaaaaatacggcgtaattaattcaataatcacattcactgcaaaaatatattcattggtttaatacaattaacctatacatatattaagatgtgttgaattgtttaaagacaataatgcatgcatttcaaatctgcaagttattcgttttattattaaagaaacttttagttataataattaccatgaattttattacataaaatattcatactgtgaatataaaatctcataccgggaaattaaaagaagatgtacattgtgcaccttccctacttaagtagggataaaccgttattggtcttattatcgtcattgataacaatcattcccgaagttatttgggatttgcagggatgactctggtcatcccttcatcccctgtataggtaataacaatactgttaccctgccagacccatccatccagattctgtttcccttccagccaaagtaacccatcttcatctactacttcagaaaaactacgtttccaggtgaagggtacattgacgcgattaagtgcaagcgcctcatactgctgttcatgacttaggtcctcgtagacctggccatcgagcagttgtttacctgaagacgtttgtacataaggcaataatggcaggctcatttccccatccctcgttaccgcaagaatggtttcatcgttatcctgcaagctatattcttcagcccactgcaggaccttgcgagccttgaaccttttttcacactcggcgctttcaaatttatccatgccattgccgacccattctggctcatccatttccgcatcatcgtaaatgctatccagccattgccggtaagcatcagggaaaaataaggatgctccattaagctcctcaatatgttgctgcgtccgccacatgactctaacgttgctataaatatgctcatgtcgtccgtaaccctcgccatcaggcagcaaaatggtggcaacaggaatctcaaaaccagcgggacgatatttgcgatgatggcgatgtaaacggcccaatcgttggaaaagcaaatctgcaggacaatgctgagtaattaaccaatcaaaatcaacgtcgagtgattgttccacgacctgggttgcgacaagtatccgtccaacatttcgcttcccatttttgccgaaattgctaataactcgattctctttttcacgacgatcgttcagcgtaaagcgcgcatgaaacaaatctatatctacttgcgtgttatttagctcctttagccgttggtagcatacttgtgcaacgtcaaccaaattgcaaataagacagacctgtgcacccgcgtttgccgctgcgatcattcgctctaacatcgtaaggtcaggtaacatgtcagctaaacaaataggttctggctgaatcgaaaagcggggcgggagttgttctggatgagctagcagatcaaaacgttgcgcaccattcacacctcgccagttaatgagtggatatgcggagttattttccactggatctgtatgcagaccataagtatccagaagtttctgtttttgtttcattggtagggttgcggaaagaagaataacactccctcccacatcagcctgagccttgagcactgcctccagcaagccgttcatataggtgtcgtaagcatgaacttcatcaacaattaaaacacttcgaccaattcccaaaccacggataaagcggtgtttaactggcaataccgatatcaacacctgatcaatcgtgcaaacgccgatttgcccaagaaacactttcttattgctttgtgacaaccactgacaacactgaacccacgcttcttcttgcccctgttcagtaatcgcgcgtgattttattgattgaaagaggtggttaaaccgtgaattgccatgagcaagaataagatttggggatgaaaataagtggctcgcgctcgcttccattctcgtaagcatagcattcgcggtagcttgtgttgggagggcaaaaataacactatccgcaatttgttgatcaataagtttccaagcataggccagcgctgtttccgttttaccggagcctgtaggtgcctctattaccgtcagcccgggagctactggaagagcatcaactaacacctgtaattgtctgggttgatagccattgtccagtagtgcatgaacaccttcataacatcgcttatttgatacaagtccactcaactccaatacccggctcgcatcctgctgtcggtcctggaaatacgttctcagagcatttatgtcggaaggcgcatcctcattaaacagaaaggtattcgttgtagtccaggagcctaaccagtcagcaagcgagcaaaaacctgctaacagtgatgaacaatcaggtggtatatcgtttatagataaccccgctggcgttaaaaataatgcttccagtacagatatccactcctcacgagcctgtttatcttgcgcagcataagatgccagagaagctggcatttcccaacgcgacttatcttgatcctgggaatgtaatataaaaccatgatgtcctgtaacggcctctacccatggaaaccaggactcataaggatgaggagcggcatcaaaaaaactgaaaaaatccccgagagattgctctgaaagtgaatcctggttaaaccaatacagaccggctgcaccatgattaaatttacggcacatttgtgttgatggaccattaagtgatggcgttgcaggatttaatttcagccaactttctgctgatttatattggaatcgtatatcaaactttccaatatcatgaagagcaatgaaaaataacagccaggccttcaccctctgttttgatagcatttcatttcggcaaaaagtattttgcagtacgactgattgatcccaccagcaatctgcaacagcagcaacatcaaggcaatgataaattaacagatgaatatcatttcctttcgtcaagctttttgaggattttccccagtaatggcatatatatttaaaaggttccattaatagcctccctgtttttttagtattatcgatgatatcagcgggctatttttcgatgctgctcataaatatcgaattacagtgatatacacatgtcttgcctccctgcaaagaagagactaacattcgaattgtttgggttcgaacgctggcctcaggttgatagaaatatcgcctggggcttttgtccatctggaacctcgcgaatgcttaacgccagacagcctcaagcacccgacgccattctatacctgataattcttcccgcggcgttcacgtttaaaatcaggaatgctgctcgcaaaataaaaacgcccccatcatttctgacagaggcgtttaatttgtccggcaatatttacccttcgtgtaacccacattccctttttaagccaaagaaacgcgtttcttcttccgccatgccgggttcccatttacgggttgtatgggtatcgcccaccgataaatatccttcatcccataatgggtgatatttcaggccatgtttttgcaggtactgataaatagttcggttatcccagtcgataatcggcagcactttaaatacgccacgctgaattgccagcaccggtaaattggcacgactgccggattgttcacggcgcaggccagcaaaccaggtttgcgcattcagttctttcagagcccggttcatcggttcgactttgttgatgtcattgtacttttcaatgccttcaacgccctgctcccacagttttccgtagcgtgcttcctgccaggctgcgctttcggtagcacggtacactttcaggttgagcttgagtttgtccgttaactcgtcaataaagcggtaggtttccgggaacaagtaacccgtatcggtgaggatcaccggaatatccgggcgaatttgattcaccagatgcaggctcaccgccgcctgaatgccaaagctggaagaaagtacatattcaccgggcagattatccagcgcccaggctacgcggccttcagcgtccagtttttccagttcggcgttagtttccgccagcgccagaatgcgatctaccttcggcagttcgttcagggcgtttagatcgagtttggacatagattcctcactgtttgccttgcctgatgcgacgctcacgcgttcttatcaggcctacaagaccgggctgatggttaatcccacaaatcacgcgccggatcgagcaccgggcgaatgatgcccgcacgcaccgtaaagtcgccgaagccttcacccgcttcgcgctctttcgcccagcgccctatcagttcatcaagcgacgccaggatttccggctcggtgatgttttctttatacatccgtgggatacgtgtcccaatgcggttgccgccaagatgcaggttgtagcgacccggcgctttacccaccaggcccacttccgccagcatcgcgcgaccacaaccgttcgggcagcctgttacacgcatcacgatatgctcatcgctgacaccatgtttcgccattaaattatcgatgttgtcgataaaagacggcaggaaacgctctgcttccgccatcgccagcgggcaagtcgggaatgacacgcaagccatcgagttttcacgctgcggcgtgacggcattcattaacccgctctctttggcgatcttctcgatcttcgctttctcgctttccggtacaccggcgatgatcagattctggttcgccgtaatgcggaaatcgcctttgtggatcttcgcgatctccagcaggccggttttcagcggacgcgccggataatcaaggatgcgaccattttcgataaacagcgtcaggtgccagttatcatcaatgcccttaacccagccaatacgatcgcctcgtccggtgaactcatatggacggatcggttcaaatttgatccccgcgcgacgctccacttccgctttaaacgtctcaacccccacgcgctccagcgtgtatttggttttggcatttttacgatcggttcggttaccccagtcacgctgagttgtcacgacggcttcggccaccgccagcgtatgctccagcggcagatagccaaactcactcgcggtgcgggcgtaggttttcttgttgccgtgttcgatggaaagcccaccgcccaccaacaggttaaagcccaccagcttgccgttttcggcgatcgccacgaagttcatgtcgttggcgtgcagatcgatatcgttctgtggcgggatcactaccgtggttttgaatttacgcggcaggtaggtctggccgaggatcggttcttcatcagtagtggcgactttttcctggtcgagccagatctccgcatacgcgcgggtacgaggcaacagatgctcagaaatcttcttcgcccactcgtacgcttccgcgtgcagctgcgactcgtaagggttcgaggtgcagagtacgttacggttcatgtcgttagctgtcgccagcgcatcaagaccgaccgagtgcagcatctggtgcaccggtttgacgttctttttcagaatgccgtggaactgaaacgtctggcggttggtcaggcgaatgctgccatagatggtgttttcaccggcaaatttgtcgatcgcctgccactgtttagtggtaatcaccccacccggcagacgacagcgaagcagcatcgcgtggcgcggctccagcttctgttcagcacgttcggcgcggatgtcgcggtcatcctgctgatacatgccgtggaagcgaatcagcaggaagttgtcgcccttaaagccgccggtcagaccgtcgtttaaatcttccgcaatggtgccgcgcaggtagttgctttcatgcttcatgcgctcggcgtctgtcagttttccttcgaccactaaaggccctggatgtttttcgctcattagtagacatctcgctgataacggcgctctacgcgcagctcacttaaaaattcatccgccgcttcggtgtccatgccaccaaattcggcaatcacttccagaagtgcctgctcaacgtctttcgccatgcgattagcgtcgccgcagacataaatgtgggcaccatcattgatccagcgccacagctccgcgccctgttcgcgcagtttgtcttgtacgtaaactttttctttttgatcgcgcgaccaggcaagatcgatacgtgtcagcacgccatctttgacgtagcgctgccactccacctggtacaggaagtcttccgtaaagtgcggattaccaaagaacagccagtttttacctggcgcttcgtcggcggcgcgttgctgcataaaggcgcggaacggcgcaataccggtgcctgggccaatcataatcaccggggtttctggattggctggcaggcggaagttatcgttatgttcgataaatacgcggacttcgccctcttcttccacgcggtcagcgaggaagctggaggcaccaccggcacgggcgcggccttccacgtcgtaacgcaccacaccaacggtgacgtgtacttcgttctcgacttccgcctgcgaggaggcgatggaatacagacgcggcgtcagcgggcgcagcagattaattagcgcttcggcatcaagctgtgccggggagaaacgcaccatgtcaacaatcggcgtcgtcgcggcgtaatgctgtaacttcgctttatcgcccaccagcggcagcagtgtttcactgcgggtaagcgtggcgtaattctcaacaatgttggcggtgttgacggtcagttcgaagtgccactgtagcgcttcgttcagaggcaacgttttgccctcgacggtgacaggttcatcgcctttcagccacagcagttcgacaagttctttcaccagtgccggatcgttctgataccagacgcccagcgcgtcacccggctggtaacgcatgcccgagtcacctaagtcaatttcgatatggcgaacgtctttttcagagttacgcccggtaattttctggttaacagagaggctagccaccagcggcgcgtctttgctgtacgggctggtgtggatttcatttaccgcgccagtagcgacggattgcgaaggtgccgcgacaggcgcacgcgatttaagcgcatcaaccacgcgggcgcgccactcgctggcagcagcctggtattcaacatcggcatcgacacggtcgagcaggcgttcaccacccagttccgccagcttgctgtcgaaatctttcccggactggcagaaaaattcataagagctatcgccgaggctaaacacggcaaacgcggtgttttccagctttggcgcttttttggagaacaggaacttatgcagcgcgacggcttcttccggcggttccccttccccttgcgttgacgtcactacgatgagcagtttttcgctggcgatttgtttgaatttatagtcgcccgcgttcaccagcttaacgttcagttttgctgctaataaatcatcacgtaatgcttcagcaacccggcgcgcattgccggtttgcgaggcggagataatagttatacccggcatttctgcggctggcgctggcgtcgctgcaagcgcagcaggctgctgattgagtacgccccagaaatagccagaaacccaggcaagctgggtgggagttaaatcggtcgtggccgcctgaaggcgtgccagttgctccgggttcaacggaagcaacgcggaaggtgggacctgtgtcgtcatgcgtcgttatgttccagtaagcaaagctgtttctgcgccctgtcagcgcccataaaacagaagagaaggtaaggttaacggggcaaacggtgtggattaaagacgggatagcgataactaataaccaaatcgactaacctgttttagcaatagtctttaacaacaaaatagattaaccaacctaatgaaaaacaaatgaatttagccaatcattaagataaatcagcgattttgcgcaacaaagtcgttttagataatgcgaaaaaacagcctttccggtactctacggcggttttatcgtcctgtagagaaattatgatgtccaccacgttatttaaagatttcaccttcgaagccgctcaccgcttaccacacgtcccggaagggcataaatgtggtcgcctgcacgggcattcctttatggtgcgactggaaattaccggggaagtcgatccgcatacgggctggattatcgatttcgctgaactaaaagcggcgtttaaaccaacctacgagcgcctcgatcaccattatctcaatgatattccaggtctggaaaacccaaccagcgaggttttagcaaaatggatttgggatcaggttaaacccgttgtgccgctgttaagtgcggtgatggtaaaagaaacctgcaccgcaggttgtatctatcgcggcgaatgataagagtgtgtcggcggtcaatttcccttaagtaacgctatgttagggtgttgtgttctggatatctggggcatgacatggaagacgactgcgacattattattattggtgccggtattgcaggcaccgcttgcgcgttacgctgcgcgcgagcgggtttatccgttttgttactggaacgcgctgaaatccccggcagcaaaaatctttccggcgggcggttatatacccatgcactcgcggaactcctcccgcaatttcatctgaccgcgcctcttgaacgacgcatcactcacgaaagcctttccctgttaacgcccgatggcgtaacgacgttttccagcttacagcccggcggtgaatcctggagtgtattacgtgcacgattcgatccgtggctggttgccgaagccgaaaaagaaggtgtcgaatgcatccccggagcgacggtggatgcactgtatgaagaaaacggcagagtctgtggcgttatttgtggtgacgatattctccgcgcccgttatgtggtgctggcagaaggtgccaacagcgtcctggctgaacgtcacgggttagtgactcgtcctgctggcgaagcgatggcgttggggatcaaagaagtgctgtcgctggaaacatccgctattgaagaacgttttcatctggagaataacgaaggcgcagcgttgctgttcagcggcaggatctgtgatgacttacccggcggcgcatttctttatactaatcaacaaacgctctcgttagggattgtttgcccgctctcttcccttacgcaaagtcgtgttccggcaagcgagctgctgactcgctttaaagcgcatccggcagtgcgcccgcttatcaaaaacacggaatcactggagtatggtgcgcatctggtgccagaaggtggcttgcacagtatgccggtgcaatacgccggtaacggctggctgctggtgggcgatgcgttgcgcagttgcgtcaataccggaatttccgtgcgcggcatggatatggcgctgactggcgcgcaggcggcggcacaaacgctgataagcgcctgccagcaccgcgagccgcaaaatctgtttccgctttatcatcacaacgtagagcgcagcctgctgtgggatgttctacagcgttatcagcatgttccggcgcttttgcaacgcccgggatggtaccgtacgtggcctgcgttaatgcaggatatttcccgcgatttatgggatcagggtgataaacctgttccaccgctgcgccagttattctggcatcatttacgtcgtcacggcctgtggcatctggcgggcgatgttatcaggagtctgcgatgtctgtagcccgtaatctctggcgcgttgctgatgcgccgcacattgttccggctgactccgttgagcgccagacggcagaacggttgattaacgcctgtccggcaggtcttttttcgctcacaccggaaggtaacttacgtattgactatcgcagttgcctggagtgtggcacctgccgtttgctgtgcgacgaatcaacactacaacagtggcgctatccgccttccggattcggcatcacctaccgctttggataaataataaggataatttatgcccctcttacacctgctccgccagaatccggtgattgctgccgttaaagataatgccagcctgcaactggcaatcgattctgaatgccaatttatttccgtgttgtacggcaatatctgcaccatcagtaatatcgttaaaaagattaagaacgccgggaaatatgcttttattcatgttgatttgctggaaggcgcgtcaaataaagaagtcgttattcagtttttgaaactggtgaccgaggcggacggcattatcagtaccaaagcctcaatgttgaaagcggcaagagcggaaggttttttctgtattcatcgcctgtttattgttgattcaatttcgtttcacaacattgataagcaagttgcgcaatcgaatccggattgtattgagatcctgccaggctgtatgcccaaagtgctgggctgggtgacagagaaaatccgccaaccgctgattgccggtgggctggtgtgcgatgaagaagatgcgcgtaatgcgattaacgcgggtgtcgtggcgctttccaccacgaataccggggtctggacgttagcgaaaaaattactttgacgggataatcgtaaccaattgaatttggtttgatttgtaggccgcacgccacatccgacattcagcgcctgatgcgacgcttgacgcgtcttatcaggcctacaagtccccaggccagaaccgtaggcaggatcatccggcaacacgttattggcaatctgcgtgaatgtttgtcaccagtgcctccagcaccactttccagtcatcaaccacgccaacatctgcctgtgaaaataccgcagcgctggcgtcatgattaatcgccaccacaaacttgctattgcgtacgcccgccattaacgctgctgcgccagaagcgccaacaacaatacacacctcaggtgccagcagatgtccggaaataccaatcactttttcagcatcaacgccaccgttcatcactcgcgcccgactgtagcccacttcggctcccagcttttctgccagcatagcgatttcctggttatctgcctctccgccctgccccaccaccagcacccgtctggcctcagctaatgggtcgcgggtaacatttttcagatcctctgtgctaaccagccagtccggaagcgcacccgggacaatgttcagttgttgcattccagagggcaacgtggcgtttttcgctgctcccgcctgacgcgccagggaaaggcatagcgggcgtttttctgtttgcagcgtcgccgttagcgcatttccccagtgggatttgcgcacgcttacggttggaatatctaacgaagtcacctggcagatgcttgcaccatgtaaacgccaggccagccgggtcgacagttcatcgccaaacgttcccggcggaaagagaacaacgtccgcaggcgttcgctgccactgttccaccaacgcatccagcacctgttccgccactacaggctgaggttcaatctgccagtgcgccagggtacaaccgctgaaatcctgcgccgccagccagcttgctattgcggcattctcctgatttattgtcacaattgcgatattcatggctgcatcctttggcgtaaatagtcctgccatagcttttgagctttttctgctaccgtttgcccatcaatcagcgtcgctccgcgtcgttgctctgctcttgccagttgcagacactgcatcgctggcatttcggcagcaacagttttacggataatttctgctttccccgcagccattcgctggcgcattcccggtactggcaaggccacttcaccgcactgacgcacggcaatcaccgcaggcaagcgaacccggcaacaacgcaacccatgttcagtacgctgttcgagggtgataaacagcgcgtcgagagtgaaacgctccacctgggtgaagcagggccagcccagcatttccgccagcaaaaatggcgtttgcccattctgcccttcgctgctttggcagccggtaattatcagatccagcggattctgatgctgccattcggcaatatggcgagcgacaaattccggcgcaaagcgcagatctgccgccgtctccagcaatacagcttcctcaaacccaagagccatgagatagcgcagccagtgcaatgcccgttcatcccccatgctcaacgcggttaaagacatcggcgtaccgttttttctctgcgccaacagcagcgcggcagcggcctgttcatcagcaccgagtaaacttcgcagtagcgaaatatccggtccgcttttaccctgagccgccgcctgccactctttttccgccagcattccggcatccggttcggctttaaacgctaacagaatgttcattcgcacctcctacatttcccgccgccaccagcgggagggctttagtttctggtgcccatagccaggtcacaacaaaaccaaccaacaacactgtcgccaggagcaataaggtgacttgcattccccactgcgccagcacccacggcagcaggccagtacttaccgccgcgccaagtcgactcatggcagtggcaaaaccgacgcccagcgagcgaatgtcagtaggaaaactttccgcaggcaaaatgcccaccagattactgactgccgaaatggtggtgctgaagagaacaaaaagcagcagcgttaatgaactgccggaaggcaaacaggccatgactaccagcgttgccgccagcagcaaaaaacttcccagcaaaaatttgcgatgtgccagcaggtgcgtcagaactaatcccagcagcgcgcccacaattaacaacgcattaagcatcaggctggcagtcagcgcatcttccagaccaatagtctgggcgatagttggcagccaggtataaatcacaaaccatgggattacgaggcagacaaagaagacgctgttaaacgccgtgcgccgccagtaacgcgaagagaacaaggttttgatgtgtttatgggtcgccgttaccacttcatcgcccagtaaaacatggggaccaaaatagcgatgcacgatagcgtgagcttctgcaaaacgcccctggcgcagtagccagcgtggtgattctggcgttccccagcgtaataacgtaatcaacaacgcgggcagagctgccgatgccagtagccagcgccaggcctccgggttttcggaaataaagtgatgtccggcaatacttgccagcacatagcctacggtccacaccacgctgaatgcgcccagcaaaataccgcgatggcggcgcggggaaaattcagccagcaaggtgtgacctactgaataatcgcctcccagaccaatgccaatcaaaatgcgcagtccaataagatgctctggcgtggtggcaaaaaattgtaaaaacgaagcaagcgtaatcagcaaaaagctgaaggtgaagattttttgccgaccaatatggtcggagatccacccaagaaccaggctgccaaggaacaaaccaaggagcgccgagccgccgatcattcccgccataaacggcgtcagttgcatggcgggcgtaagctgaataatggcgtaaccaatgacgccgagaacataaccgtcggtcaggtgtgcgccgaaagtgagcgcagcaatgcggcagtgaaaacggttaagcggtaaatcatccattcgcaccggtgaagtgttcatctttaccccttcattgtccggtaataagaacggcttctcgcctgagaagccgaaaaggcaacgccccgtcatcgcggaacgctgcctgacacattatttttcaatcggatagatagtacccgtattcataatgccattaggatcgaactgctttttcagcccttccagcaacgcccacgcgctgccgtgttccagtttgctccagtgaacgcgatgtttaccgataccgtggtggtgcaccatcgaaccgccgaggcgaatggtttcttcacagatgatcttgttgagcggattgtggtacttgtcgatttcctcttccggcttacagtcaacgacgttgtaatcgtagacgaagtacatgttggtgccgttctgatagctatgagaggaatgaccgcccagcatggtgatgtcgtcggcgtgcgggaactcagtacgaatacggttaataacgctttcgtagatttcgtggatgcagctccagcagccggatacttcggtggtaaagcccatgttgccggttttgaggatctgcacacgttcggcagccactttatccggtccccagttcaggttgttaaaccaggtttcgatcagcttgctgtccacgcgctggcattgcgggtagcgggcaacgatttccgcaatcccttcgcccgtcaccttcgcaatgcgagggttaccttcagccataaagatcagcacgcattttccgtcggcaaaatgggtgaagtgttgggtgccatcttcagcgtcatacaaacgagcgattgacggacgatacccttccaccatgatttcacgcaggatgttgaagccggttttcatgtcttccaggatatagccgtagaagaggttgttttccggggtgaatttaaagattttcactgttacttcagtgatatagcacaatgcaccttcgttgccgatgatgatgtgacgaatgtccgggccagccgcgcggcgtggcacgtttttaatgcgtgtgacggtgccatcagccaatactgcttccagaccaacgaccatatcttcgattgcgccgtagagtgtggagaactgcccgatacttcgggttgctaccaggccgcccatctgcgccagcggctttgactgcggagaatgccccgtggtgtaacctttttcacgcaacgcgttttccagcacttccagcggaacaccacattgcgccgtcgcctgcatattctcaatatcaatattaatgatttgattcatggcggagccgtcgagcaccaccgagttttctacaacagtttccagcccaccttcggtggcggaagcaccggtacgcggcacaccgttaattttgtgcgcattcataaaattcagcacacgggatacttgctctgtggaaccgagttttacgaccgctgccggaatcggcaaagtataaatgccatgaatatccggaaatttacgaaaacggtcaatactgtttttctttaatactgtttcatcggtaattacgcgatctgcaccaacaatttcctttagctggtcgacaatcgctgcgcgagataaagacatagtaattccttcctgataataaaaatggaataatcattaataagagaaaacagaaaccaccgttatgggttagcgcactaaataaccgccatcaaccactaataaatgcccgttgacataattcgatgccggacttgcgaggaatacggctgcgcccattaaatcctgagtatcgccccaacggtttgccggaatatgatcaagaacgcgctgattggtttctggattactgcgtgtcgccagcgtaatatctgttgcataatagccaggggcgataccatttacctgaatattatattgacctagttcatcacaataagctttggtgaacccggcaagagcatgtttagtggcagaatatgcaggtgaccattgtccacctaagtaagagaacaatgaacagatattaataattttgccgcttttctgcgggatcataatttttgcagcttcatagcttaactcgaatgcggcggtcaggttcacatcaatcatcggatcccagtcggcacgaccgaagtccagcaccttattcagcttacaaataccggcattgttaaccagaatatcaactgtaccgaaacgctcacagcaagcagcgataatcttctgcggcgcgccttctgcggtgatacccacctgcatgaagtccacctcaacaccctgtttttcaatcatttcctttgtttcgccgttatctttgacgaaactaggaataaagatatttgcgccagctttggccaacgccatggcaaatgcctggcctaaaccgctattcccaccggtaacaattgcggttttacctttcagggagaaaaaatccattgagaacgcattgagagattcgattgacatagttagctccaatttccgtaaggcaaaaaaaaagaaaggtaacttcccccgcgagagggaagttacctttctcattatctctggtaactggagataatttttagcataagggcataactgctaatgtgatcgtaatcacagtgtgatattcgtattgtcaaataattttaaaaagcagaagcgtgattactctcacacaacacctctgctttccatgttatttattatttcaattactagagacctgagaaaagtaatccacctgaaagggcggcttacttttctcttttttttgtctattacaaatgggaatacgatatgcaacacaactcatatcgccgttggataaccctcgcgataattagttttagcggcggcgttagtttcgacctggcttatttacgttatatttatcaaattcccatggcgaaatttatgggattcagcaataccgagataggtttaataatgagtacctttggtattgcggccattattctttatgcccccagcggcgttattgccgataaattttcacaccgcaaaatgattacttccgcgatgatcattaccggattactgggtctgttaatggcaacgtatccaccgctgtgggtaatgctctgtattcagatcgcctttgcgataacgacgattttaatgctgtggtcggtgtcgattaaagctgcatcgttgcttggcgatcatagcgagcaagggaaaattatgggctggatggaagggctgcgcggcgtcggtgtaatgtcgctggcggtgtttaccatgtgggtcttttctcgctttgcaccggatgacagcaccagcctgaaaacggtcattatcatctatagtgtggtttacatcttgttggggattctgtgctggttttttgttagcgataacaacaacctgcgcagtgccaataacgaagaaaaacagtcattccagcttagcgacatcctggccgttttgcgtatcagcaccacctggtattgcagcatggtgatttttggcgtcttcaccatctacgccattctgagttactccaccaactatctgaccgaaatgtatggcatgtcgctggtggcggcgagctacatggggattgtgatcaacaaaatattccgcgcgctgtgcggcccacttggcggcataatcaccacctacagcaaagtgaaatcccctacccgcgtgatccaaatcctttccgtactcggcctgctgacgttaactgccctgctcgtcacgaactctaacccgcaatcggtcgcgatggggattggcctgattttactgctgggattcacctgttacgcctcacgcgggctgtactgggcctgccctggcgaagcgagaacaccgtcttacattatgggcaccacggtaggtatttgttcggtgattggattcctgccggatgtcttcgtttacccaattatcggccactggcaagacaccctgcccgctgcagaagcctaccgcaatatgtggctgatgggcatggcggcgcttggcatggtgattgtctttacctttttgctgttccaaaaaattcgtactgctgatagcgcccccgcaatggctagcagcaagtaagccaggaaaattacaggagaaaaatcatgtcgaaaaaatacatcatagggattgatggcggaagtcagagcacaaaagtggtgatgtacgatctggaaggtaacgtggtttgcgaaggcaaaggcttattacagccgatgcacacgccagatgccgatactgcagaacatcctgacgacgatttatgggcatcattatgttttgccggtcacgatttgatgagtcagtttgccgggaataaagaagatattgtcggtattggtctgggatccatccgttgctgccgtgcgttattgaaagccgatggcacgcctgctgcgccgttgattagctggcaggatgcacgcgttacacgcccttacgaacacactaaccctgacgtggcatatgtcacctctttttcgggttatctgacgcatcgcttaaccggcgagtttaaagacaatatcgccaactattttggtcagtggccggtggattataagagctgggcatggagcgaagatgctgcggtaatggataagtttaatatcccccgtcatatgctgtttgatgtgcaaatgcctggcaccgtcctcggacatatcacaccacaagccgcactggcgacacatttcccggcaggactgccggttgtttgtaccaccagtgataaaccggtagaagctctgggggccggattactggatgatgaaacggcggtaatttctcttggcacttacatcgcattgatgatgaacggcaaagcactgccgaaagatccagtagcgtactggccgattatgtcttctattccgcaaacattgctgtatgaaggttacggtattcgcaaaggcatgtggacggtgagctggctgcgcgacatgctaggcgagtcgttaattcaggatgccagggcgcaggatctttcaccggaagatttactcaacaaaaaagcttcttgtgtgccgccaggctgtaatggtctgatgacggtgctggactggctgaccaatccgtgggaaccgtacaaacgcgggattatgatcggctttgattccagcatggattacgcatggatatatcgttcgatactggaaagcgtggcgctgacgctgaagaacaattacgacaatatgtgtaatgaaatgaatcactttgcgaagcatgtgatcattactggcggcggttcgaacagcgatctgtttatgcagatttttgccgacgtgttcaaccttccggcacgacgtaacgccattaacggttgtgcaagcctgggggcagcgattaatacagcggtaggtctggggctatacccggattacgcaacggctgtcgataacatggttcgcgtgaaagatatctttataccgattgagagcaatgccaaacgctacgacgcgatgaataaaggcattttcaaagacctaaccaaacatactgatgtgatcctgaaaaaatcgtatgaagtgatgcatggggaattggggaatgtggattcgatccagagctggtcgaatgcgtaagtgaggaaggccgggcgggaaactgcccggcctgaacatacctgaatggttatccccgctgacgcggggaacataagttcgacaacttaaaaaatgataacaagtccggtttatccccgctgatgcagggaacataataaaaactttaactagttcggtttatccctgtttttacaaggaatattaactacactcgatgtctttagaataaaagacaatacgaatcgcactttatcaattttcacttaaagtatgaactggatatctttattcataagaactattcatcaacagcgtatagaggcggttatgtaaaaccactcattagcctcaaaacaaagacaaacttccagatttattacttaaccaatgaataacaagcttaaaaaatatactgttattctaaagaaaaaattaacaggcattaattcaatattaaaaaaataatagattaaaatttcttaacgatttaagaatcatacaaataacactttgattaaatttaattttttgtatcgataattgtgaacctctctggcatggagaactattttgaacatgaggtgttacgtggatatgttgcttattacaagtactgctaatataaaaacttgagaaagagataacgggttatatggtggtttatccccgctggcgcggggaactcgacagaacggcctcagtagtctcgtcaggctccggtttatccccgctggcgcggggaacacctgttttcgcaaatctatggactattgctattcggtttatccccgctggcgcggggaacacgggcgcacggaatacaaagccgtgtatctgctcggtttatccccgctggcgcggggaacactggctctgcaacagcagcacccatgaccacgtcggtttatccccgctggcgcggggaacacgaaatgctggtgagcgttaatgccgcaaacacaggtttatccccgctggcgcggggaacacattacgcctttttgcgattgcccggtttttgccggtttatccccgctggcgcggggaacactctaaacataacctattattaattaatgattttttaagccagtcacaatctaccaactttatagtatcacacaaacaacacatccattatgttaaagagcacttaatccattgattaaaaaggtaaatatttaaaataactctatacaaactaaaatctaccaaactttaccgcaataattttcactccagcgaaaaattaatgccacagaatttgtagagaatgctaatgattagccctggatgggtaaaatggaggagttttcagaggcgacaaacaatataaatgagtagaagtctttacaggttccacccatttataacgcttataaatgtttaatcaggcaatatttagatatttatgtgtttgcatcgacaaacgccaattacgcgcaatgcaggtttcaatgcacaaacgtgtggcatcatccttttggctaatcggctgcagtgcaatgactcgcggtttatcatcggtcagcgttgccagtagttcatccagtgcttcaatatcgcgtacgcgccccactggatgcttgatttcgttggctcgctccagtgcctgtgacaacacttcatagccgccgcgcatgttcagctttggcgatacggtaacccaggtattcggtgtgcagcgtacctcatgagtaccactggtttcgatctggcagctaaaaccgttcttttcgagcagatcagtcagtggcagcaaatcatgaatgcaaggctcaccacccgtaatcaccacatgccgcgcggtgtatccctggcgaccaatgacagccagcaaatcttcactgctcgcagccccccacttatcactctctttggtcttcgccagaatgctgaaaagggagacttcccgatcctcaagcttttcccaggtgtgtttggtgtcgcaccaggcacagccaaccgggcatccctgtaaacgaataaaaatggcgggaacgccggtaaagtaaccctcaccttgcagggtctggaacatctcgttaatcgggtactgcatagcattctctgtgaagtggataattgttaattattgcagatcctgccacaacaatcatgtcttattaacattctgttacaggcaggtttaaagaaaaatgcgaaacatatcgttaataattaaagggagtaacgtattatgtcagaagaaaataaagaaaatggatttaatcatgtcaaaacattcaccaaaattatatttattttttctgtattagtttttaatgataacgaatataaaattaccgatgccgccgtcaatttatttatccagatttaatgagaaatttataatgcgctatttcatactaatgttcactttcgtatgttcctttgttgcagcccaaccaactattgtcccacaattacagcaacaagttacggatcttacgagtagcttaaactcacaagaaaagaaagaactgacgcacaagttagaatctattttcaataatacccaagtgcaaattgccgtattaattgttcccacaaccaaagacgagacaattgaacaatatgctacaagagtttttgacaattggcgtttaggagatgccaaacgtaatgatgggatactgatcgttgttgcctggtcggatcgcactgtccgcatccaggtaggttatgggctggaagaaaaggtaaccgatgctctggctggagatatcatccgtagcaacatgatacccgcatttaaacaacaaaaattagctaagggattagagctagctataaacgctttgaataaccaactcacttcacaacaccaatatccgactaatccttcagaaagtgaatcagcgtcttccagtgatcattattactttgctattttttgggtatttgcagtgatgttcttccctttctggttttttcatcaaggcagtaatttttgtcgcgcatgtaaaagtggagtctgtatttcagcaatctatcttttagatttattcctgttctccgataaaattttttccattgctgtattttccttcttttttactttcaccatatttatggtctttacctgtttatgtgtacttcagaaaagagcatctggtagaagttatcattcagacaacagcggttccgctggaggctcagatagcggcggatttagcggcgggggcggttcttctggaggtggcggcgcatccggccgctggtaactcaaccataaaaaatgccagcccggaggctggcatttttaaatcagataaagtcagtcttatgcctggcctttgatctctttacgaccgttgtacggtgctttttcgcccagagcttcttcgatacgaatcagctggttgtatttagcaacacggtcagaacggctcatagaaccagttttgatctggcctgcagcagtaccaacagccaggtcagcgatggtagcgtcttcagtttcgccagaacggtgagagataactgcagtgtagccagcatctttcgccatcttgattgcagccagagtttcggtcagagaaccgatctggttgaatttgatcaggatggagttagcgatacctttttcgataccttctttcaggatcttggtgttggttacgaacaggtcgtcaccaaccagctggattttgtcgcccagaactttggtctggtatgcgaaaccgtcccagtcagattcgtccagaccgtcttcgatagaaacgatcgggtactgtttggtcagttcttccaggaagtgagtgaattcttcagaggtgaacgctttgttgccttcgccagccagaacgtatttaccatctttgtagaattcagaagctgcgcagtccatcgccaaagtgatgtctttgcccagttcataaccagcagctttaacagcttcagcgataacagccagagcttcagcgttggaacccaggttcggcgcatagccaccttcgtcaccaacagcagtgttcatgcctttcgctttcagaacttttgccaggtgatggaaaacttcagaacccatgcggatggcttctttcacagttttcgcgccaaccggctgaatcatgaattcctggatatcaacgttgttgtcagcgtgctcaccaccgttgatgatgttcatcatcggaaccggcatagagtatttgcccggagtaccgttcagttcagcgatgtgctcgtacagcggcatacctttagcagctgcagcagctttggcgttagccagagatacagccaggattgcgttcgcgccgaatttggatttgttttcggtgccgtccaggtcgatcatgatcttgtcaatgccagcctgatctttagcatctttgccaatcagcgcctgagcgatcgggccgtttaccgcagcaacagctttggttacgcctttacccaggaaacgggatttgtcgccatcgcgcagttccagagcttcacgggaaccagtagaagcacctgacggagcagctgccataccgacgaaaccaccctccagatgtacttcggcttcaacagtcgggttaccacgggagtcgatgatttcacgaccgatgatttttacgattttggacattaggttttcctcaagtcactagttaaactgaaactccagacaaacaacgcgtacccagggtacgcgttgccgctctaacttttttacttacttcgcctgacgtttctggaactcgctggcggctttcacaaagcctgcaaacagcgggtgaccatcacgtggagtagaagtaaactccggatggaactggcaagccacgaaccacgggtgattcggaacttcgatgatctcgaccaactgatcatccccggaacggcccgcaacgcgcagacctgcatcttcaatctgtttcaacagcatgttgttgacttcgtaacggtgacgatgacgctcaacaattgtcggcgcattgtacagctggcgaaccaggctatcgtcaaccaactggcactgctgtgcgccgagacgcatggtaccgccgagatcgctcttctcgctacgaacttcaacgttgccgttttcatcgcgccactcggtaatcagcgccacaaccgggtacttacagtctggcacaaattccgtagagttggcgttctccatgttggcaacatggcgagcgtaatcaattaacgccacctgcatacccaggcaaatgcccagataaggaatattgttctcacgcgcaaaacgcgcggtcgtaatcatgccttctacgccacgatagccgaaaccgccaggtacgaggattgcgtccagacctttaaggatttcaacgccgcgcgtttcaacatcttgtgaatcgatcagtttgatgttgacgctgacacgattcttcagcccaccgtgtttcagtgcttcgatcactgatttataagcatccggcagttcaatgtacttgccgaccataccgatggtgacttcacttaccgggttcgcttcttcgaagataacctgttcccattcggacagattcgcttccgggcagtttaagctgaatcgtttacaaatataatcgtccagcccctgagatttcaacaggcccggaattttatagatggaatcgacgtctttcagagaaataaccgctttttccggaacattacagaacaatgcaatcttcgcacgttcgttcgccggaacagcgcgatctgaacgacaaatcaggatgtcaggctggataccgatggagagcagctcttttacagagtgctgagtcggtttggttttgacttcaccagacgctgccatgtacggcaccagcgtcaggtgcataaacagagtgtgctcacggccaatttcaacagccatctggcgaatcgcttcgaggaacggcaaggattcgatatcacctactgtaccgccgatttctaccagtactacgtcatgaccttcgccaccttccagcacgcgctctttgattgcgttagtgatgtgcggaataacctgcacggttgcgccgaggtagtcaccgcggcgttctttacgcagaacgtcagagtagatacgacccgtggtgaagttgttgcggcggctcattttggtacgaatgaaacgctcgtagtgccccaggtccaggtcggtttcagcgccgtcttcagtaacgaacacttccccgtgttggattgggctcatagtacctggatcgacgttgatgtacggatccagtttcatgatggtcacattgaggccacgggcttcaagaatggctgcgagggaggctgcggcaatgcctttacccagagaggatacgaccccgccggtcacaaaaatatagttcgttgtcatgctgaacctgagaagttaggttgaaaagacgatggaataaccaagacgggaaagcagtatacccgaacatgacctgtgccacaaactttcattatccctcctcttcgccagcgcactattgaaatcaggagtgagaaaatagcccctttggggtaaatgtttttgacgcaaatcaagcgcttgtcatttaaaaaatgacacaaatggcgcttgaccgcgtaattcccttagagatcaatttcctgccgttttacctgttgccagacttcttccattgtttcgaggtcaacacctgtcatttccagtccacgcgcggcaacaatacgctccacttcgcgaaaacgacgctcgaatttttcgttcgctttttgcaatgcgatttctgctttcgtccctaaatggcgagccagattaaccgtggcaaacagcaggtcccccatttcctcctccagtttagcctggtcgacaacagcctgccgcgcttcgtacatcacctcgtcgatctcttcgtagactttatcgactaccggaccaagcgtcgtccaatcgaagccaacgttggcgcaacgtttctggattttttgcgcacgcattaaagccggtaaactacgaggaatatcgtccagcgccgaatgctgcgctttctgcgcgcgctcttcggttttgatttgctcccaacgggcaagcacttcactactgttttcggcagaactatcagcaaaaacatgcggatggcgacgctctaatttatcgctaatagcagcgcaaatatcattaaagtcaaagcgcccttcttcctgagccatttgcgcgtaaaacaccacctggaatagcagatcgcccagttcaccgcgaagatcgtcaaaatcttcacgggcgatggcgtccagcacttcgtaggtttcttcaagggtgtaaggcgcaatggtggcaaatgtctgctctttatcccacgggcagccgttttccggatcgcgcaggcgctgcataatagtgagcaaacggtcgatttgattcattgaattgtcctgaaaattgcgggtctgtcaggtggaaacctgtgaccagaatagaagtgagttagtaacactacccaatcagtacgttaattttggctttaatgagttgtaattcctctggggcaactgttcctttcttcgttgctcctcttgcccgccaggcgatactttttacctgatcagctaacgctacgccatcacgttcctgaccggataaaacaacttcgaacggatatccttttgattgcgttgtacaaggaacacacagacacatacctgttttgttgttgtacatgaaaggactcaggacaacagctggacgatgtccagcttgctcgctaccttttgtcgggtcaaaatcaacccaaatcagatcgcccatatcgggtacgtatcggcttaccattaccagacttccttatctttcggctctccccagtcgatattctcgtggaggttttccggcgtgatgtcgttgaccagttcagcaagcgtaaatacgggctctttacgcactggctcaataattaatttgccatccaccaggtcaatcttcacttcatcatcaatattcagattgagcgcctgcattaacgtagccgggatccgcaccgccggtgaatttccccaacgctttacgctactgtggatcataaccctttcctcaaaccgctatcatatgtagatacagtatatatcaatctacattgtagatacgagcaaatttcggcctaactcccgtgcaaccgacgcgcgtcgataacatccggcacctggttgagtttacccagcacgcgccccagcacttgcaggttgtaaatctcaatggtcatgtcgatggtcgccagttgctgtttggtgtcgctacggctggcaacgccaagcacgttcaccttctcgttggcgagaatggtcgtgatatcacgtaacaacccactacgatcattagctaccacgcggaccaccagcgaatatccggcggagtagctctcaccccataccgcgtcaacaatgcgttctggcgcatgggagcgcagttccgccagttgttcgcaatcggcgcggtgtactgaaataccgcgcccctgggtaatgaagccgacaatctcatctccaggaatcggctggcagcagcgcgcgatgtggtgcatcaggttgccaacaccttcgactaccacgcgaccgttatctttactgcggttttgcggcgtgtagcttttttgctgaagttgcttcagcgcggcggcgtcctgctcttcggcactcggcttattaaattgcgattgcaggaagttcaccatctgattgagacggatatccccgccaccaatcgccgccagcaactcgtcgacatcattgaagttgtaacgcggcagcagatgtttttctgcttctttcaggctgatccccagatgttccagctcgtcgtcaaggatttgccgcccagccagaatgtttttgtcacggtcctgtttacggaaccaggcgtgaattttcgaacgcccacggctggttgtgacgtaaccgaggtttgggtttaaccagtcacggctggggttcggctgtttctgggtgataatttcaatctggtcgcccatctgcagctggtaggtgaacggcacaatgcgcccgccaatttttgccccgatgcagcggtgtccgacatcactgtggatgtggtaagcgaagtccagcggcgttgatcccgcaggcaaatcaacgacatcacctttcggcgtaaagacgtacacccggtcgtcaaagacctgactacgtacttcgtcgagcatttcgccggaatcagccatctcttcctgccacgcaatcagtttacgcagccaggcaatccggtcttcatgtcccgaacgtgcgccgccagcagccgcgccctctttatatttccagtgcgcagcaacacccaactctgcatcttcatgcatctgtttggtgcggatttggatctcaacggtttttccacccggccccagaaccacggtatgaatagactgataaccgtttggtttcgggttagcgacgtaatcgtcaaactcatccggcaggtggcgatagtgagtgtgcactatccccagtgcggcatagcaatcctgtaaacgctcggcgacaatacgtaccgcacgcacatcaaacagctcatcaaaggcgaggttctttttctgcattttacgccagatgctgtagatgtgtttcggacgaccatacacttccgctttaacgccttcagctttcatctcagcgcgcagatgaccaacgaactcttcgatgtagtgttcgcggtcgagacgccgttcatgcagcagtttggcaattcgtttgtattcggttggatggaggtaacggaagcagtaatcttccagttcccatttcagttgtccgattccgagacggttagccagcggtgcgtagatgttggtacactcttttgccgccagtacacgttcatcttccggcgcatcttttacttcgcgcagatgagcaatacgctccgccagtttgatgactacgcagcgaaaatcatcgaccatcgccaataacatccggcgaacgttatcgacctgttcggaggaaacagaatcagtgtgcgtcgctttcagctggcggatcgccgccatatcacgcacgccgtgaataaggttaacgaccgacttaccgacgctctcacgcagcacatcttcgctgactacgttggcatccgccagagggaaaagcagcgccgcccgcagcgtgtcaatgtccatacttaatgtcgagaggatctccaccatctcaacaccacgccacaataacagactggcatccggatgcccctgcgtctgttgcagacaatacgcccaggtttcggctaagcactcacacgacttctggctggtaatacccagacttgcgatccatttttccggatcaaattcaccagccttattgatatgtgcacttcttaccgcaaccatcgtcctctcctttagggaccagacctgccgaaatcggcaaatcgcaactatttaacgcgcgagaaaagtaccatcgattccagatgtcccgtgtgtgggaacatatccagcatcgccagtcgcgcaatggtatatcctgcttttaataacgcttcgctatcccgagccagcgttgcagggttacaggatacataaactatacgaataggttccagttttataatttgctgcataacacctgcggcacctgctcgcgccgggtccagcaacactttatcgaagccgtttttcgcccacggctgctttgtgacatcttcttcaagattttcgtgataaaacgtcacattctgtaagccattaagacgcgcattctgctggcctttttccaccagcgccggaacaccttctacaccgaccacactggcagcttgtgtcgccaatggcagtgtaaagttgcccataccgcagaacagatccagtacgcgatcttcaggttgcacatccagccattccaacgcacgcgctaccattttttggttcacacccgcattgacctgaataaaatcgcgcgggctaaaagttaagcgcaacccgtttgagtcataccagggcatctcaccagagacggtttcgagtatctcactatcgggggcgagatacagatccaggccttcagaatgcgaaaagcgttccagtttttcgcgatctgccgaacttagcggtgcggtatggcgcaaaatcatcagcgtgccgctggttgcctgtaccagttcaacatgaccaagatggcgcatagcttgtaagctgcccagacatgccctgactttgggcagcaatgcttcaagttggggcgctaaaatggggcattgtttgacgtcgacaatgtcactggagcccgctttgcgaaaccccatctgaagttgctgtgttttcggtaagtagttcagacttaaacgcgcgcgacggcgatagccccagggaacatcggcgatcacttcagagacatcgtgtttcattaatcgggcgagtgccgcacttttgcttcgctgctgtaaatccacgctggcgtgttgttgctgacagccaccgcatacgccaaaatgaggacagcgtggcgtttcgcgttccgggctatcgcttaaccggcgtacgactttagcgcgggcatactgttttttatcttcagtaacagtaacttccgcgttttcctgcggcaataatccggggataaatagcgttttgccgttatgtcgcgccacgccctgaccaaaagagtcgaggtcgttgactgaaacggttatgatctgacgcgtcgtcgtgcgtcgttttgcagagtagaattgcgccattggcgagactttctcaatttaacagtgtgaccttaattgtcccataacggaactccatgaccaactacagcctgcgcgcacgcatgatgattctgatcctggcaccgaccgtccttattggtttattgctgagtatctttttcgtcgtgcatcgctataacgacttgcagcgtcaactggaagatgccggtgccagcattattgagccgcttgcagtttctactgaatatggcatgagcctgcaaaatcgcgaatctatcggtcagttaataagcgtactgcatcgtcgccattccgatattgttcgcgcgatttcggtttatgatgaaaataaccgactctttgtcacctccaattttcatcttgatccctcatcaatgcagctcggcagcaacgtgccgtttcctcgccagctcactgtcactcgtgacggcgatattatgatcctccgcacgccgattatttctgagagttactcccccgacgaatcgcccagtagcgatgccaaaaatagtcaaaatatgttgggatatattgcgctggagctggatcttaaatcggttcgcttgcagcaatataaagagatctttatttccagcgtgatgatgctgttttgtatcggtattgcgcttatttttggctggcgcttaatgcgcgatgtaaccggtccgattcgcaacatggtgaataccgtcgaccgcatccgtcgcgggcaactcgacagccgggtggaaggatttatgctcggcgagctggatatgctgaaaaacggtatcaactcgatggcaatgtcgctggctgcttatcacgaagagatgcagcacaatatcgaccaggcgacgtccgatctgcgtgaaacgctggagcagatggaaattcagaacgttgagttagatctggcgaaaaagcgcgcccaggaagcggcgcgtattaaatccgagtttctggcaaatatgtcacacgagctgcgtacaccactgaatggtgttattggctttacccgcctgacgctgaaaacagaattaacaccaacgcagcgcgatcacctgaatacgattgaacgttcggcaaataatttgctggcaattattaatgatgttctcgacttctcgaaactggaagcaggtaagctgattctggaaagtattccattcccactacgcagcacgctggatgaagtcgttactctgctggcacattcttctcacgataaagggttagaactgacgctcaatattaaaagcgacgtgcctgataacgtgatcggcgacccgctgcgattacagcaaatcatcactaacctggtggggaatgcaattaaattcaccgagaatggcaacattgatattctggtagaaaaacgtgcgctgagtaataccaaagtgcagattgaagtgcagattcgggataccggcattggtattcctgaacgcgatcaatcgcgcttattccaggccttccgacaggctgatgccagtatttcccgccgtcatggtggcaccgggctggggctggtgattacacaaaaactggttaatgaaatgggcggcgatatttcgttccatagccagccgaatcgcggttcaactttctggttccacattaatctcgatctgaacccgaacattattatcgaagggccatccacccagtgcctcgcaggtaagcgcctggcctatgtcgaaccaaactccgcagcagcgcaatgcacgctggatattttaagtgaaacgccgctggaagtggtttatagcccaacgttctccgcgctgcctcccgcgcattacgacatgatgttgttaggcatcgcggtgaccttccgcgagccgctaacaatgcaacatgagcgattagcgaaagcggtatcgatgaccgatttcctgatgctggcacttccttgccatgcacaagtcaatgctgaaaaactcaagcaagatggtatcggcgcgtgtctgctgaaaccattaacacctacacgcctgttgcctgccctgacggaattttgtcatcacaaacaaaacacgcttttgcctgtaaccgatgaaagtaagctggcaatgacagtcatggcggttgatgacaaccccgctaacctgaaacttatcggcgcattgctggaagatatggtgcaacatgtggaactttgcgatagcgggcatcaggcggttgaacgggcgaaacagatgccgttcgatttgatcttaatggatattcaaatgccggacatggatggcattcgggcctgcgaactcatccaccaactcccgcatcagcaacaaacgccggttatcgcggtaacggcgcatgcaatggccgggcaaaaagagaagctgcttggcgcagggatgagcgattatctggcgaaaccgattgaagaagagcgattgcataatttgttgttgcgctacaagcctggcagcggtatttcctctcgcgtcgtgacgcccgaagtcaacgaaattgtggtgaacccgaatgcgaccctcgactggcaactggcactacgccaggcagcaggaaaaaccgatttagcgcgcgatatgctgcaaatgttactcgatttcctgcctgaagttcgcaacaaagttgaggaacagctggttggagaaaacccggaaggcctggttgatttgattcataaactgcatggcagttgcggctatagcggtgtgccacgtatgaagaatctctgccaactgatcgaacaacagctacgtagcggtactaaagaagaagatttggaaccggagctgctggaactgttggacgagatggataatgtcgcgcgcgaagccagcaaaattctcgggtaatggatgtcttgtcgagtagcaatcggctttttatgacgctggtttcagattggtgacaaagtgcctgtgtttatgccggatgcggcgttaacgccttatccggcctacaaaaccaattaaattcaatgaattaaaaaatgatgtagacctgatacatagcacaacaggctattttgcgtttagcatcagtctcaaaccggctccagatagagccggttttggttttctgtcttaacgcaccatgcacgggcgcttgttatcgaacgtccagccaggaatcagatactgcattcccatcgcatcgtcacgcgcgccaagcccgtgtttctgatacagctcatgggctttcatcacttgatccatatcgatttctacacccagccccggtttttctggcacctgtaccagcccgcctttgatctcaaacggttctttggtcaggcgctgattgccttcctgccaaatccagtgcgtatcaatagcagtaattttacccggtgcagcggcggcaacatgggtaaacatcgccagggaaatatcgaagtggttgttagagtgtgaaccccaggtcaggccaaattcatggcacatttgcgccacacgtaccgaaccttgcattgtccagaaatgcggatccgccagcgggatatcaacggattgcagggagagcgtatggcccatttgccgccagtcggtggcgatcatattggttgcagtcggtagacctgtcgcgcgacggaactctgccatcacttcacgcccggagaaaccttgctccgcaccacacggatcttctgcataagccagcgaacctttcaggtatttaccgattttaatcgcttcgttcagcgaccaggcaccgttaggatcgagcgtaatacgcgcctgcgggaagcgttgcgccagtgccacaatagactcggcctcttcttccccggccagtacaccgcccttcagtttgaaatcgttgaagccatatttttcatatgccgcttccgccaggcgcaccaccgcatccggcgtcatcgcttcttcatgacgcaggcgataccagtcgcatgagtcatccggctggctttgatacggcagcggcgtggctttgcgattaccgacgaagaacagataaccgagcatttcgacttcgctacgctgttgaccatcgcccagcagcgatgccacgtttacccccagatgctgccccagcagatccagcattgccgcttctatcccggtaactacatgaatagtggtacgtaggtcaaatgtctgcaaaccgcgcccaccagcatcacgatcggcaaaagtattacgcaccagcgtcagaacgtttttgtattcacccagcgttttacctaccaccagcggaatcgcatcttccagcgttttacggattttctcgccgccgggaatttcccctacgccagtgtgaccagaattatctttgataatcacaatattacgcgtaaagaacggtgcgtgtgcaccactcagattcatcagcatactgtcatgacccgccaccgggataacctgcatttcagtaacaacaggcgtcgtaaattgagaactcatatttatgtcctttttcagaatcaatgacggccgaaaacgggacgtttacggtcaaaggtccagccggggatcaggtactgcatcggacctgcgtcgttacgcgcaccgccaggcagacgtttataggcctcatgtgccttttgtacctgttcccagtccagttccacgcccagaccgggcgcatcaggaacggcaatttttccgtttttaatctccagcggattttgggtcaggcgacaatcgccctcctgccaaatccagtgggtatcgatagcggtaggattacccggtgccgccgcgcccacatgggtaaacatcgccagagagatatcgaaatggttattagaatggcagccccaggtcagcccccagtcgtcgcaaagctgcgccacacggactgcaccggaaagcgtccagaagtgcggatcggcaagtggaatatctaccgcattgagcatcaccgcatgacccatttcgcgccagttggtggcgatcatgttagtcgcgacgggcaagccggtcgcccgtcgaaattccgccatcacttcacgtccggagaagccctgttctgcgccgcatggatcttcggcataggtaagaacatcattcagccctttgcataaagaaatggcttcatcaagcagccatgcaccgttgggatcaacggtaatccgcgcatccgggaagcgtttcttcaatgcacgaacagtgtcgatttcttgctcgccaggtaacacgccgcccttaagtttgaaatctttaaagccgtagcgatcctgtgaggcttccgccagacgcacaacggcttcgctgttcattgctttctgatgccgcaactgataccactcatggttgcccggcgtattttccacataaggaagatcggttttggtccgatcaccgatataaaacagataaccgaggacggtaatagcctcgcgttgcttgcctggccctaacagttcgcagaccggaacattcagcgccttacctagcaggtcaagcaaagcggcttccagcgccgccacggcgttaacgcgtaattcaaaggtccaggcacctttaccgaaggtatcaaaatcggcggcctgattacctttatgcacctgctggaccactttattcagtcgcgcaacttcctggcccagaaccatcggaatagcatcgacaagcgtctgataaatcacatctccgcccggcgcttcaccaatgccggtatgcccggcgttatcggtgagtaccacaatattgcgggtgaaatatgcgttatgtgccccaccaatattaagcaacatgctgtcatgcccggccaccggaatgactttcatatcagtaataacaggactggattgtgtcgccatcttattgccccgcaacaggtttcaactcgatacgcttgatatcgcccaccagcaccaggtagctcagtaccgcgattaaggcatgaacaccaacataaatcagcgccccattaaacgagccagtcgtgccaacgatataaccaattgcgattggcgtgacgatgccagaaatgttaccgaacatgttgaacaggccaccggaaagaccgctgatctcttttggcgcggtatctgccattactgcccaacccagcgccccgatgcccttaccgaagaaggccagcgccataaagccgatgatcatccactcaacgttgacgtagttgcagaacaccatcaccatcgacagcaacatgcccattacgatcggtgttttacgcgcaatgttcagcgatcccgtgcggcgcatcagccagtcggaaataatcccacccagcacaccgccgataaaaccgcaaaccgccggaacggaagccacaaagcccgctttcagaatcgacatcccgcgtgcctgcaccagataaaccgggaaccaggtaataaagaagtaagtcagggcgttgatacagtactgaccgatataaacgccgatcatcatccgtgaccctagcagctgtttgatctgcccccacttcacgctgaacggcactttaactttggtgttttgctgatccatattgatcagcgcaccacccgcggcgatgtactccagctctttcttatttacccccggatgttgatttggctcgtggatgactttcaaccagataaagctgatgacaatccccagaccgcccataaagaagaagacgtgtgaccagcccacttcatgcgtcagccagcccataatcggcgcgaagatcaccgttgcgaagtattgagcggagttaaaaatcgacaccgccgttcccctttcctgcgccggaaaccaggccgcaacaatgcgactgttgccggggaaagatggcgcttcagcaagcccgaccaggaagcgcagcgtaaacagggcaacgataatgccgaatccactaaagatatcgacgaagccttgcagcaaggtaaacatcgaccagataaagatcgaccagaagtagacgcgttttgaaccaaaacggtccagcaaccagccaccagggatctgcccgataacataagcccatgagaaagcagagaacacatagcccattcccacgggatcaaggccgatatctttggccatttccgaaccggcgatagagagcgtagcgcggtcgccgtagttgaaggatgtgacgataaacaacatcaccactatccagtaacgagcatttgtgcgtttttccacactgctcgcagcctgacttaaagaactcattgttgcactcctgaaaattcgcgttagccacgctcactctggactgcgacatcgccaggaaatcagaggtgacgtagggtgttttttgccgtttttataggtcgttcgccgaatacggcgcgtgtttatatctggcaatagcagtataaaaagcgcgccatagcggctcaccgtgcaacaacacaacattaatgcgttcaatgaggcccgattttggcattagccctggacggtggaatccacttcacggaaatgaaaacaagaacaagaaaggaagggttaaaacgaagaaataaagaagagtatgaaatggatcgcttgactccaggcaaacgccagtaaaaatccgcgctatgaagcagtttttactggcatttgcctgaaaagattcgattcagcaccgctaaaacgacatttaccgctcgctgaacatatcaggacaacagcgtgccccactgttcgacccacggatttgattccgtttccggttccgggttctcactggcgtcaatcaacagcatttcgccaacccgctgagcgctctgttcctgcaacaaggcatcgaactgtttgccgccattgcagaaattcacataactactgtcgccgagcgcaatcacgccataacgcagattcggctggaagcccagactatctttgattccctgaaagagtggcacaatgctatcaggaaggtcgccctgcccggtcgtggacgtaaccaccagaacatacttatcctgatagggcagccagtcgcttaattcaggatcttcaaataccgttgctttgtggccctgcgcggtcagaatcgcttccgcttcttcggccactaacagtgaattcccgtacatggtgccgacaaaaataccaatttccgccataccgttttctccctggattaggaacttatctctccatcctgacccgatggcgcactgaactcaaccctttcattttcaggaagcagaccgcgccagccaaattgtgataacgcctgcatccaggtgtcgtccaggcccgcgtgaatagtcagcggctcgccagtaaaaggatgcgtcaatgacaactgactggcatgtagcattaaccgctggaggccaaaatgctcagcaccgctgcgattctggcgtaaatcgccatgtttgctatcgccaataatcggatgacgcaaatgggcaagatgtcggcgaagctgatgtttgcgtccggttttcggctccagttccaccaggccgtagcgcgtggtcgggtaacgtccggtcgctaccggcatttctacggtcgccagaccgcgataatgcgtcactgctggctgcgggcctttatcttcgcgggcaaatttatcagcgattttgtccagttcttccaccagtggataatccagcaccgcttcttccatcaaccagccgcgcacaatcgcatggtaacgtttctggatttggtgctgttcaaactgttgtgccagcagccgtccggcctcgctggataatcccatcaacaacacaccagaagtgggtcggtccagacgatgagcagtaaaaacatgctggcctatctggtcacgcacggtttgcatgaccactactttctcgtcgcgatccagccagctgcggtgaaccagccagccggagggtttatttaccgcaaccagccattcatcctgatagagtatttccagcattagctcgcatcatccgcaaaaagagcatccagtttttccagctcagccagaataagcgcgcgttgcggatggtccgtcgccagcgccatttcataatagggtgcaacggcaaaagcgcccggtaacggctgtttgttatctaacaaatcgtgcattcgcgggatcagcacccactgcaaccactccagtggttccatggtgtccataaagaacggttgggtactattaaattgatgcggctggggttcatcgtttcgccagtgctgatgttcacgcagtaacgcttcaagcgcctgcaactggagacgaacgcggtcatgagtggtcataaagcaacctcaataagaaaaactgccgcgaaggatagcaggaataaaaaaagggagcactgtattcacagcgctcccggttcgtttcgcagcattccagctacttttgttgctccctgctcatccttgacaacttttcctctggccttgcggccaatcgttcatcctgaactattgcttcctgctcacaccaccccgatgtgatacttcatcctgaagtgtccctggccttcctgacccaccgaatcatcctgaccggttctcattctccatcctggaggtgtcctttaacgcgtcctgcgtcatcctcttcgcttcatccagaagcctttccctgaaacaccatcctggtgtgtcctgcagaagtgtcatcatcctgatgttcacttcgttgtctgactccctgtcgacgaagatagaatcgtctttttcgcgaagtcttacaaggcgcttacagacaatgccttaaggaaaatttcatatgaaagttaagaattaacaatcaacattttgattttaaatgaaaataacgattcttatctttttaagtattcgcttatttcctggcgatctcctacagagtctgtaagagatctctcacaaccagatggggtatttggattacagaagaggcttaagttgattaaggaattccgcaagatttgaggctaaatgcgtccgtttacgtgttcccagcgtctctttgcacacttcaccggagagattacacaccgagatgacctctaactcttcttccagcgtcgcgataaatagtgtgggcggcagttttagccttttctgagtcaccagatgaccaatcagattttcctgcacccgacggaagtcgtcttcactccaggtttgcagcaatgtcagtttgatatcgccaaactgcgcgtgcatatccccggcaaactgagtcgtataaaaggtatgaattgtgggttgtatcacaatatcaaaagcgcgttcaaccgcgtttacattttgttccccggtaaacggctggggttgccagtatacggcatcttcggtagttgaaataatgcacggtgaaggaacaccgtacagttcctcacttaacggccagcttttatgctcttcatgccacgcatcgcagtagcgtgcagtaaaatctttcagggcttgtgcggtcaaatcgtccactaatttctctcttcacttaaaccagatacacttgtcgtttagtttatctggtttatgacggtgaaacatgtcttcttatgcaaaccatcaggcacttgcgggcctgactcttggaaaatcaaccgattaccgggatacctatgacgccagcctactgcaaggcgttccacgcagcctgaatcgcgacccgctgggtctgaaagcggataacctgccttttcacggtacggatatctggacgctgtatgaactttcctggctgaatgcgaaaggtttgccgcaggtcgctgtcggtcatgttgaacttgattacaccagcgtaaatctgattgagtcgaagagttttaagctctatctcaacagttttaaccagacgcgttttaataactgggatgaggtgcgccagacgctggagcgcgacttaagcacttgcgctcagggtaagattagcgtggcgttatatcgtcttgatgaactggaaggccagccgataggtcattttaatggcacttgcattgatgaccaggatatcactatcgataactatgaattcactactgactatctggagaatgccacctgtggtgaaaaagtagtggaagagacgcttgtcagccacctgctgaaatcaaactgcctgatcacccatcaaccagattggggttcgctccaaattcagtatcgtggacgccaaattgacagagaaaaactgctgcgttacctggtctcattccgtcatcacaacgagttccacgaacagtgcgtggaacgcatctttaatgacctgttacgcttctgccagccagaaaaattgagcgtttacgcacgttatacccgtcgtggcggtctggacattaacccgtggcgcagtaatagcgattttgtcccatcgaccacaagactggttcggcaataaattttttctcaattttgcgtgctggattcacgcagaaggttgtgaaaggtcatcaggcagggctattgtaatcaaagggaatgacgatattcgtcccataaggagtttttcttgattacacatattagcccgcttggctccatggatatgttgtcgcagctggaagtggatatgcttaaacgcaccgccagcagcgacctctatcaactgtttcgcaactgttcacttgccgtactgaactccggtagtttgaccgataacagcaaagaattgctgtctcgttttgaaaatttcgatattaacgtcttgcgccgtgaacgcggcgtaaagctggaactgattaatcccccggaagaggcttttgtcgatgggcgaattattcgcgctttgcaggccaacttgttcgcggtcctgcgtgacattctcttcgtttacgggcaaatccataacaccgttcgttttcccaacctgaatctcgacaactccgtccacatcactaacctggtcttttccatcttgcgtaacgctcgcgcgctgcatgtgggtgaagcgccaaatatggtggtctgctggggcggtcactcaattaacgaaaacgagtatttgtatgcccgtcgcgtcggaaaccagctgggcctgcgtgagctgaatatctgcaccggctgtggtccgggagcgatggaagcgccgatgaaaggtgctgcggtcggacacgcgcagcagcgttacaaagacagtcgttttattggtatgacagagccgtcgattatcgccgctgaaccgcctaacccgctggtcaacgaattgatcatcatgccagatatcgaaaaacgtctggaagcgtttgtccgtatcgctcacggtatcattatcttccctggcggtgtgggtacggcagaagagttgctctatttgctgggaattttaatgaacccggccaacaaagatcaggttttaccattgatcctcaccggcccgaaagagagcgccgactacttccgcgtactggacgagtttgtcgtgcatacgctgggtgaaaacgcgcgccgccattaccgcatcatcattgatgacgccgctgaagtcgctcgtcagatgaaaaaatcgatgccgctggtgaaagaaaatcgccgtgatacaggcgatgcctacagctttaactggtcaatgcgcattgcgccagatttgcaaatgccgtttgagccgtctcacgagaatatggctaatctgaagctttacccggatcaacctgttgaagtgctggctgccgacctgcgccgtgcgttctccggtattgtggcgggtaacgtaaaagaagtcggtattcgcgccattgaagagtttggtccttacaaaatcaacggcgataaagagattatgcgtcgtatggacgacctgctacagggttttgttgcccagcatcgtatgaagttgccaggctcagcctacatcccttgctacgaaatctgcacgtaatctccgctcccccggtgacgtttgttgccgggttttctcgtttttggtcacttactcatcaactcatttcatttgttatatgaatgtttcttaccaccctcacgcgacaaatatcatcacagttaatatgtcatacaatttatgttgcaacgcaaacgtttccctattttcataaaccgtattttatcgctatgaaaaagaaattatcgccatgattaactaaaagtattgattttttcagttcaacctacatatattgcgcgccccggaagaagtcagatgtcgtttaatgggcaaatattgcccttaaattctcttttacttttgatttacagagtaaagcgttgggataatctatcttccaagtagattattgtatttgagatcaagatcactgatagatacataacttgtgtgtatctttccgccctcaaattattacggcggtaaatgattaagccatcgccgatagacagatttcatttttacggtcaggcaccttcccgggctgaactggctaaaagctgaattatttgcattcctccaggagaaatagatggaaacgactcaaaccagcacgattgcgtcgaaagactctcgtagtgcctggcgcaagacagacaccatgtggatgctgggcctttacggcacggcaatcggcgcgggcgtgctgttcctgccaatcaacgccggtgttggcggtatgatcccgctgatcatcatggctatccttgcgttcccgatgacgttttttgctcaccgcggcctgactcgcttcgtactgtctggtaaaaacccgggcgaagacatcaccgaggttgtagaagaacactttggtattggcgcaggtaaactgattaccctgctctacttcttcgctatctacccgatcctgctggtttatagcgtggcaatcaccaataccgttgaaagcttcatgtctcaccagctgggtatgacgccaccgccgcgtgcgattctgtcgctgatcctgatcgtgggtatgatgaccatcgttcgcttcggtgagcagatgatcgttaaagcgatgagtattctggtattcccgtttgttggcgtactgatgctgctggctctgtacctgatcccgcagtggaacggcgctgcactggaaacgctgtctctggacactgcatctgcaaccggaaacggtctgtggatgaccctgtggctggcaattccggtaatggtgttctcgttcaaccactctccgatcatctcttctttcgccgttgcgaagcgtgaagagtacggcgatatggcagaacagaaatgctcgaagatcctggcattcgcacacatcatgatggtgctgaccgtaatgttcttcgtcttcagctgtgtactgagcctgactccggcagacctggctgcggctaaagagcagaacatctcgattctgtcttacctggctaaccactttaacgcaccggttatcgcgtggatggctccgattatcgcgattatcgctatcaccaaatccttcctcggtcactacctgggcgcacgtgaaggcttcaacggtatggtgattaaatctctgcgtggtaaaggtaagtctatcgaaatcaacaagctgaaccgtatcactgcgctgttcatgctggtaacgacctggattgttgccaccctgaacccgagcatcctgggtatgattgaaaccctgggcggtccaatcatcgcgatgatcctgttcctgatgccgatgtacgcaattcagaaagtaccggcaatgcgtaagtacagcggtcacatcagcaacgtattcgttgtcgtgatgggtctgattgcaatctccgcaatcttctactctctgttcagctaagtcctttcgcgccgctttcgggcggcgcttcctccgttttaacgcgatgtatttcctatgattagcgtattcgatattttcaaaatcggcattggcccttccagttctcataccgttggaccaatgaaagcgggtaaacaatttaccgacgatctgattgcccgtaacctgcttaaagacgtgacccgcgtggtggttgacgtgtacggctcgctctctctgaccggtaaaggccaccacactgatatcgccattattatgggcctggcgggtaacctgccggataccgtggatatcgattccatccccagttttattcaggatgtgaatactcatggtcgcctgatgctggcaaacggtcagcatgaagtggagttcccggttgatcagtgcatgaacttccacgccgacaacctttctctgcatgaaaacggtatgcgcattaccgcgctggcgggcgataaagtcgtttacagccagacttactactctattggcggtggctttatcgttgatgaagagcattttggccagcaggatagcgcaccggttgaagttccttatccgtacagttcagcagccgatctgcaaaaacattgtcaggaaaccgggctgtcactctctggcctgatgatgaaaaacgagctggcgctgcacagcaaagaagagctggaacagcacctggcgaacgtctgggaagtcatgcgcggcggtattgagcgcggtatttccaccgaaggcgtgttgcctggcaaactgcgcgttccacgccgtgctgcggcactacgccggatgctggtcagccaggataaaaccaccactgacccgatggcggttgttgactggatcaacatgtttgcactggcagtgaacgaagagaacgctgctggcggtcgcgtggtgactgcgccgactaacggtgcgtgcgggattatcccggcagttctggcgtactacgacaagtttatccgcgaagtgaacgctaactcactggctcgttacctgctggtagccagcgccattggttctctttataagatgaacgcgtcgatttctggtgctgaagtgggttgccagggtgaagttggcgtggcgtgctcaatggcggcggctggtctggcagaactattaggcgcaagcccggcgcaggtgtgcatcgcggcggaaatcgccatggagcacaacctcggtctgacgtgtgacccggtcgccggacaggtacaggtgccatgcatcgagcgtaacgccattgcggcagtaaaagcggtgaacgccgcacgtatggcgctgcgccgtaccagcgagccgcgcgtctgcctcgataaagttatcgaaaccatgtacgaaacaggtaaagatatgaacgccaagtaccgcgaaacctctcgcggcggcctggcaatgaagatcgttgcctgcgattaatcgctctccaaaggcctcgttttgcgaggcctcttcccgatttctcatccagccgtagcctgttccggcatcgaatgttacccttatcgcctgatctttaagggggttatcgtggctgttcatttgcttattgtcgatgcactgaatcttattcgtcgcattcatgccgttcaggggtcgccctgtgtcgaaacctgccagcatgcgctcgatcagctcattatgcacagccagccaacccacgcggtcgccgtttttgatgatgaaaaccgcagtagcggctggcgtcatcagcgtttaccagattacaaagcgggtcgaccgccaatgccggaagagttgcacgacgagatgcctgcattacgcgccgcctttgagcaacgcggcgtcccgtgctggtcaaccagcggcaacgaagccgatgacttagccgccacgctggcggtcaaagtgacacaggccgggcatcaggcaacgattgtttcgacagataaaggctactgtcagttactttcaccgacattacgtattcgtgattacttccagaaacgttggctggatgcgccatttatcgataaagaatttggcgttcaaccgcagcagttgcccgattactggggacttgcggggatcagcagttcaaaggtaccgggtgttgcgggaatcggaccaaaaagcgccacgcagctgctggtcgagtttcagagtctggaagggatatatgagaatctggatgcggttgccgaaaagtggcgcaaaaaattagaaacccataaagagatggcgtttctgtgccgcgatattgcccgcttacaaaccgatttgcatatcgacggcaatttacagcaattgcggttggtacggtaacggcgagccggatacgccgcaaacgtcgtatccggcattatcacatcagcgcatttaccaggcggtatggtaaagctctacaatatcctcaagcgttgcttcacgcgggttgccaccggtacaaacatcatccagtgccgcctgcgccagtgccggaatgtcttccttgcgtacaccaacatcacgcaaatgtggcggaataccgacatcacggttgagagcaaacaccgcttcaacagcggcattacgcgcctcttccaggctcataccttccactttcacgcccataacgcgcgcgatatcgcggtacttctcaccggtaaagtcagcgttataacgcatgacatgcggtaacaggatggcgttcgcaacaccgtgtggagtgttataaaacgcgcccagtggatgcgccataccatgcaccaaccctaacccaacattcgagaagcccatacccgcaacatactgcccgagcgccatttcttctccggcatccttatcaccagcaaccgatcctcgcagcgccccagcaatgatttcaatcgctttaatgtgcagtgcatcggttagcgcccacgcgccacgggtaatatacccctcaatagcatgagtgagcgcatcgacacccgtcgcagctttcagcgctggaggcataccatccatcatgtcagcgtcaataaacgccacctgcgggatatcatgcggatcaacgcaaacaaacttgcgccgtttctcttcgtcagtgatcacgtagttaatggtcacttctgccgcagtacctgctgtggtaggaattgccagaatcggtacactgggtttattggtcggggaaagcccttccaggctacgcacatcggcaaactccgggttgttgctgataatgccaatcgctttacaagtatcctgtggagaaccaccaccaatagcgatcaggtaatccgcgccgctattctggaatacaccgagcccttctttgacgacagtaattgttgggttgggcactacgccgtcgtaaatcgcccatgccagccctgcagcatccatcttatcggtcactttcgccaccacgccgcattgcaccagcgttttatcggtgacgatcagcgccttctgataaccacggcgtttcacctcatcggttaaagccccaacagcaccccgaccaaaccatgccgtttcgttcagaatcattctgttagccatcatccttctccttgttgctttacgaaattactcttcaattcgtaacccataggttttgaatttctccagcactacggcaatctcttcatcgctcagcactggcaccgggtccgtaatcgccagggtcgtcaggtaaagttgcgccagcacttcaacttcatgcgccagccataacgctttttccagattcacctcacaagcgataagcccatgatgttgtaacaaagttgccttacgatttttgagagccagcgcaacatgttcagaaagttcgcgtgttccaaaggtcgcataaggcgcgcaaggaatagaattaccgccagccgccgcaatcatgtagtgaatagcggggatcgatcggttaagaatggaaactgccgtgcaatgaacggcatgattgtgaacaaccgcgttggcatccggtctgctttgataggctgccatatggaaacgccattcgcttgaggggagctttccttcctcatgtttaccgttgccatcaataaagacaatatgcgactccgtcagtttttcatatggaatgcctgtaggcgtaatcagcatcccatcctgataacgtacactgacgttccccgctgtcccctggttcagtcccaggcgggtcatttccaggcaagtgtcaataatctgacgagcaagtttatttcgttccattagctacctctctctgattcaaaacagggcaataatgttgttcctttcacactattgaattagccgtttaattacccaccatcttcttcctgattaacaagaaagaaattcacaagcttatattttgtgacctggttcaactaatcacagtaaataactgcaagttctctttttataaccccattaaaaatgaccgctcttaaaaatatttatcaaaacggtcatttttctattcctccaagcccggaatgaccgttttcggcacaaacaattaatacggtcatctgatttgtgttttttatgatttattttctgaaacgggcatgaaatttcgattattaaagtgatggtagtcacataaagtcaccttctagctaataagtgtgaccgccgtcatattacagagcgttttttatttgaaaatgaatccatgagttcatttcagacaggcaaatattcactgatatgaagcccgaactcgctggttttgcacttttgaaaacataaccgattacgtgcttaagcttctgaacctaagaggatgctatgggaaacacatcaatacaaacgcagagttaccgtgcggtagataaagatgcagggcaaagcagaagttacattattccattcgcgctgctgtgctcactgttttttctttgggcggtagccaataaccttaacgacattttattacctcaattccagcaggcttttacgctgacaaatttccaggctggcctgatccaatcggccttttactttggttatttcattatcccaatccctgctgggatattgatgaaaaaactcagttataaagcagggattattaccgggttatttttatatgccttgggtgctgcattattctggcccgccgcagaaataatgaactacaccttgtttttagttggcctatttattattgcagccggattaggttgtctggaaactgccgcaaacccttttgttacggtattagggccggaaagtagtggtcacttccgcttaaatcttgcgcaaacatttaactcgtttggcgcaattatcgcggttgtctttgggcaaagtcttattttgtctaacgtgccacatcaatcgcaagacgttctcgataaaatgtctccagagcaattgagtgcgtataaacacagcctggtattatcggtacagacaccttatatgatcatcgtggctatcgtgttactggtcgccctgctgatcatgctgacgaaattcccggcattgcagagtgataatcacagtgacgccaaacaaggatcgttctccgcatcgctttctcgcctggcgcgtattcgccactggcgctgggcggtattagcgcaattctgctatgtcggcgcacaaacggcctgctggagctatttgattcgctacgctgtagaagaaattccaggtatgactgcaggctttgccgctaactatttaaccggaaccatggtgtgcttctttattggtcgtttcaccggtacctggctcatcagtcgcttcgcaccacacaaagtcctggccgcctacgcattaatcgctatggcactgtgcctgatctcagccttcgctggcggtcatgtgggcttaatagccctgactttatgcagcgcctttatgtcgattcagtacccaacaatcttctcgctgggcattaagaatctcggccaggacaccaaatatggttcgtccttcatcgttatgaccattattggcggcggtattgtcactccggtcatgggttttgtcagtgacgcggcgggcaacatccccactgctgaactgatccccgcactctgcttcgcggtcatctttatctttgcccgtttccgttctcaaacggcaactaactgaacatattttccgaataaagtgaggaatctgtaatgaaaaaaatcagcttaccgaaaattggtatccgcccggttattgacggtcgtcgcatgggtgttcgtgagtcgcttgaagaacaaacaatgaatatggcgaaagctacggccgcactgctgaccgagaaactgcgccatgcctgcggagctgccgtcgagtgtgtcatttccgatacctgtatcgcgggtatggctgaagccgctgcttgcgaagaaaaattcagcagtcagaatgtaggcctcaccattacggtaacgccttgctggtgctatggcagtgaaaccatcgacatggatccaacccgcccgaaggccatttggggctttaacggcactgaacgccccggcgctgtttacctggcagcggctctggcagctcacagccagaaaggcatcccagcattctccatttacggtcatgacgttcaggatgccgatgacacatcgattcctgccgatgttgaagaaaaactgctgcgctttgcccgcgccggtttggccgtcgccagcatgaaaggtaaaagctatctgtcgctgggcggcgtttcgatgggtatcgccggttccattgttgatcacaacttctttgaatcctggctgggaatgaaagtccaggcggtggatatgaccgaactgcgtcgccgtatcgatcagaagatttacgacgaagccgaattggaaatggcactggcctgggctgataaaaacttccgctatggcgaagatgaaaataacaaacagtatcaacgtaatgccgagcaaagccgcgcagttctgcgcgaaagtttactgatggcgatgtgtatccgcgacatgatgcaaggcaacagcaaactggccgatattggtcgcgtggaagaatcacttggctacaacgccatcgctgcgggcttccaggggcaacgtcactggaccgatcaatatcccaatggtgacaccgccgaagcgatcctcaacagttcatttgactggaatggcgtgcgcgaaccctttgtcgtggcgaccgaaaacgacagtcttaacggcgtggcaatgctaatgggtcaccagctcaccggcaccgctcaggtatttgccgatgtgcgtacctactggtcaccagaagcaattgagcgtgtaacggggcataaactggatggactggcagaacacggcatcatccatttgatcaactccggttctgctgcgctggacggttcctgtaaacaacgcgacagcgaaggtaacccgacgatgaagccacactgggaaatctctcagcaagaggctgacgcttgcctcgccgctaccgaatggtgcccggcgatccacgaatacttccgtggcggcggttactcttcccgcttccttaccgaaggcggcgtcccgttcaccatgactcgtgtcaacatcatcaaaggcctgggaccggtactgcaaatcgcggaaggctggagcgtggaattgccgaaggatgtgcatgacatcctcaacaaacgcaccaactcaacctggccaaccacctggtttgcaccgcgcctcaccggtaaagggccgtttacggatgtgtactcggtaatggcgaactggggcgctaaccatggggttctgaccatcggccacgttggcgcagactttatcactctcgcctccatgctgcgtatcccggtatgtatgcacaacgttgaagagaccaaagtgtatcgtccttctgcctgggctgcgcacggcatggatattgaaggccaggattaccgcgcttgccagaactacggtccgttgtacaagcgttaatacattactccctgatgtgatgcccggtcgctccggctaccgggcctgaacaagcaagagtggttagccggataagcaatgttatccggctatattgcaggagcgattatgaaacaagaagttatcctggtactcgactgtggcgcgaccaatgtcagggccatcgcggttaatcggcagggcaaaattgttgcccgcgcctcaacgcctaatgccagcgatatcgcgatggaaaacaacacctggcaccagtggtctttagacgccattttgcaacgctttgctgattgctgtcggcaaatcaatagtgaactgactgaatgccacatccgcggtatcgccgtcaccacctttggtgtggatggcgctctggtagataagcaaggcaatctgctctatccgattattagctggaaatgtccgcgaacagcagcggttatggacaatattgaacggttaatctccgcacagcggttgcaggctatttctggcgtcggagcctttagtttcaatacgttatataagttggtgtggttgaaagaaaatcatccacaactgctggaacgcgcgcacgcctggctctttatttcgtcgctgattaaccaccgtttaaccggcgaattcactactgatatcacgatggccggaaccagccagatgctggatatccagcaacgcgatttcagtccgcaaattttacaagccaccggtattccacgccgactcttccctcgtctggtggaagcgggtgaacagattggtacgctacagaacagcgccgcagcaatgctcggcttacccgttggcataccggtgatttccgcaggtcacgatacccagttcgccctttttggcgctggtgctgaacaaaatgaacccgtgctctcttccggtacatgggaaattttaatggttcgcagcgcccaggttgatacttcgctgttaagtcagtacgccggttccacctgcgaactggatagccaggcagggttgtataacccaggtatgcaatggctggcatccggcgtgctggaatgggtgagaaaactgttctggacggctgaaacaccctggcaaatgttgattgaagaagctcgtctgatcgcgcctggcgcggatggcgtaaaaatgcagtgtgatttattgtcgtgtcagaacgctggctggcaaggagtgacgcttaataccacgcgggggcatttctatcgcgcggcgctggaagggttaactgcgcaattacagcgcaatctacagatgctggaaaaaatcgggcactttaaggcctctgaattattgttagtcggtggaggaagtcgcaacacattgtggaatcagattaaagccaatatgcttgatattccggtaaaagttctcgacgacgccgaaacgaccgtcgcaggagctgcgctgttcggttggtatggcgtaggggaatttaacagcccggaagaagcccgcgcacagattcattatcagtaccgttatttctacccgcaaactgaacctgaatttatagaggaagtgtgaaatgctgaaaacaatttcgccgttaatttctcccgaactattgaaagtgctggcagagatgggacatggagatgaaattattttttccgatgctcactttcccgcccattcgatgggaccgcaggtgatccgcgctgatggcctgttggtgagcgacttgctccaggcgattatcccgttatttgaactggacagttatgcaccgccgctggtgatgatggcggcggtagaaggtgacactctcgatcctgaagtagaacgacgttaccgtaatgcgctttcactacaagccccgtgtcctgacatcatccgcatcaatcgttttgcgttttatgaacgggcgcaaaaagcctttgcgatcgttatcacaggcgaacgagcgaagtacgggaatattcttttaaaaaaaggggtaacaccgtaatctcataccggtacgcccgcatgacgcgggcggttatcgaatgatggggtgaaaaatatgaaagcggcacgccagcaagcgatagtcgacctgctgctgaaccataccagcctgaccacggaagctctctctgaacagctaaaggtcagtaaagaaaccattcgtcgcgatctcaatgaattacagacgcagggtaaaattctgcgcaatcatggacgcgctaaatatatccaccgtcaaaatcaagacagtggcgatccctttcacatcaggctgaaaagccattatgcgcataaagcagatatcgcgcgcgaggcgctcgcgtggattgaagaagggatggtgatagccttagacgccagttcaacttgctggtatctggcacgccagttgcctgacatcaacattcaggtcttcaccaatagccatccgatttgccatgaactcggtaaacgcgaacgcattcaactgatcagttccggcggcacacttgagcgcaaatatggctgttacgtcaatccctcgctgatttcccaacttaaatcgctggaaatcgatctgtttattttttcttgtgaagggatcgatagcagcggcgcactgtgggactccaatgcgatcaacgctgattacaaatcgatgctattaaaacgtgccgcgcaatcgttgttattgattgataaaagtaaatttaatcgttcaggggaagcccgcatcgggcatctggatgaggtaacgcacattatttctgatgagcgccaggttgcaacttctttggtaacagcctgacggaaagggtagcaggccggagacgacgccccggccttgcctgttatcgctcgtcgcgacgaccacccaccgcagcccagatgcggcggacgtgcaccgtcacttcttcgcgatcgtgatacaactgccgcgcctgaatctgagcatttatgccatgttcatcaagctgtgcctgaatatacgccagattgtgtgacacttcttcgtagcgttttttcatcggcagtttgaggttgaaaatggtttcacggcaccagccattaaccagccactgcgccatcaatgccgcaactttcgccggtttttcaaccatatcgcataccatccaggagatattgctgcgcgtcggacggaatttgaaaccgtcttcccgcagccacgtcacctgtccggtatccatcagactttgcgccatcgggccgttgtcgacggaataaacccacatgttgcgcttcaccagttggtaggtccagccgccagggcaagcgcctaaatccaccgcccacatcccgttcgccaggcgttcatcccactcatccgcaggaataaacacatgaaatgcctcttccagtttgagcgtggaacgactcggcgcatctgccggaaatttcaggcgcggaatgcccatatagaacggcgaattattgttgctgtatgagtaaccggtatagcagcagcctggtgcaataaagaatacatgcacaaccggacgcttcggcgtttcatagttcgccagcaccccggcatcgcgcaaggcagcgcgtagcggaacagtaaatttacggcagaatttcagtaactctttgctttcgttggtatcggcaacttcaacacgcagttcaccgcccttctctactacgccctgtaacatgccgacaatgggggtaatacgatcttctggcggcaaatgctgcaggagttcccccaccacaaaccactggcgggcaaaaattaatgaactgaacggcagctcacggattaacttatcgccatcatcaggttgataacattcataaatgacataacccgcattctctttcacgcgggcaaaaccgaaaatttcccgctggccggctttatcggtaatttctgcggcgcactctttttcaaagcccggacggcacagcaatacaaccttattcatgacttacgcccttgcgctttaaacggatagcaccaactaacattaacgcccagcccgcgaggaagctcacgccgccaaccggagtgacaaacgcccacaaacgcagatgggacagcgccaggcaataaaggctgccgctgaacaacaccgtgcctaacgcgaggaaaacgctactccagtaaaaccagatactgatgcgacgctgcattgccaccgccagacctaagatcgccagcgtatgaaacgcctggtattcgaggccggtctggatccagcccatctcaacggcccccatggttttacttaacacatgcgcgccaaaagcgcccagagccacaaaaatgaagccgctaatggcggcgaaaatcagcataaaacggctggtcatggtcgtaccctacgtaaattattgttcataacgaaagcggaatttttcttgttcagcagcggctttcgccaggatccattggcgaaaggcggctattttacccagttctgcctgactgtcatgacaaaccagataaaaagcatttttactgaccagaacatcattaaacgggcaaacaagacgtccggcctcgatttcagattgcgccatcacgttatttgccagcgccactccctgcccgtggatagccgcttgcagcaccatggcgctatggctaaaaattggcccttgctgaacgttgatatgatttaaccccaactgtcgggtatatgtctgccagtcacggcgcgaagcatcatgtaataacgtatgtttagccagatcttccggtgtcttcaagggtttttcgccagtcagcagtagcggcgaacacaccggcaataaatattcggcgtacagtttttccacccgtagccccggccagttgccccgaccataaaatatcgccacatcaacatcatccgccagcttatcttcctgacgatcaaccgcctggattcgaacgtcaattcccggataagctgaattaaagctggaaagtcgcggaaccaaccaatgaatggcgaaactggggagtaaactgaccgtcaacgcccccttggcgctacgggcctggagtttacgcgtcgcttcggttaattgcgaaaatatctctttgatatcgaggaaatagctttgcccttcctcggtcagcaggagtgaacgattacggcggcggaacagttttagccccaaaaaatcctcaagagacttgatttgatgacttactgcggcttgggtcacaaaaagctcttctgctgcgcgagtgaaacttaaatggcgtgctgcggcatcaaaaactcgtaaggcatttagcggtggtaatcgtttagacatggctattaaactttgatgttaaatgaatttaacaattagatcacactatgtaacctattagtttttttaatctgagccattataaattgtccgttgagcttctaccagcaaatacctatagtggcggcacttcctgagccggaacgaaaagttttatcggaatgcgtgttctggtgaacttttggcttacggttgtgatgttgtgttgttgtgtttgcaattggtctgcgattcagaccatggtagcaaagctaccttttttcacttcctgtacatttaccctgtctgtccatagtgattaatgtagcaccgcctaattgcggtgcttttttttaccttgcgatcgcgaattactgatccagttcgaccatctctttcacgtcagtacggttgatctgctgtttgttgccattagcgtctttatacgaaatcataccggtatcgttatcagtctgtggtttgccgtcagagacgatggtacgtccgtcattggtgtgcatcacatagttcgaaccggaacaggcgctcagggcaaaagtcagcatacaggcagaaataattgcggcagtctttttcatcatcttctccttaaagcgattaataaatcttaatagtattgattaacaggctaaaattaacgcctaacactattcagcatatgttacttacgcggcttcgccaggatatccagataattctgatggttagcactctccttgtatcaaagtgaattttgcgtcacgatcggtgcatcaagccgaggagtaccatgaacgtttttaatcccgcgcagtttcgcgcccagtttcccgcactacaggatgcgggcgtctatctcgacagcgccgcgaccgcgcttaaacctgaagccgtggttgaagccacccaacagttttacagtctgagcgccggaaacgtccatcgcagccagtttgccgaagcccaacgcctgaccgcgcgttatgaagctgcacgagagaaagtggcgcaattactgaatgcaccggatgataaaactatcgtctggacgcgcggcaccactgaatccatcaacatggtggcacaatgctatgcgcgtccgcgtctgcaaccgggcgatgagattattgtcagcgtggcagaacaccacgccaacctcgtcccctggctgatggtcgcccaacaaactggagccaaagtggtgaaattgccgcttaatgcgcagcgactgccggatgtcgatttgttgccagaactgattactccccgtagtcggattctggcgttgggtcagatgtcgaacgttactggcggttgcccggatctggcgcgagcgattacctttgctcattcagccgggatggtggtgatggttgatggtgctcagggggcagtgcatttccccgcggatgttcagcaactggatattgatttctatgctttttcaggtcacaaactgtatggcccgacaggtatcggcgtgctgtatggtaaatcagaactgctggaggcgatgtcgccctggctgggcggcggcaaaatggttcacgaagtgagttttgacggcttcacgactcaatctgcgccgtggaaactggaagctggaacgccaaatgtcgctggtgtcataggattaagcgcggcgctggaatggctggcagattacgatatcaaccaggccgaaagctggagccgtagcttagcaacgctggcggaagatgcgctggcgaaacgtcccggctttcgttcattccgctgccaggattccagcctgctggcctttgattttgctggcgttcatcatagcgatatggtgacgctgctggcggagtacggtattgccctgcgggccgggcagcattgcgctcagccgctactggcagaattaggcgtaaccggcacactgcgcgcctcttttgcgccatataatacaaagagtgatgtggatgcgctggtgaatgccgttgaccgcgcgctggaattattggtggattaatgacaaacccgcaattcgccggacatccgttcggcacaaccgtaaccgcagaaacgttacgcaataccttcgcaccgttgacgcaatgggaagataaatatcgccagttgatcatgctggggaaacagcttccggcattgccagacgagttaaaagcgcaggctaaagagattgccggatgcgaaaaccgcgtctggctgggatatacagtggctgaaaacggcaaaatgcatttctttggcgacagcgaagggcgcattgtgcgcggcctgctggcggtgttgttgactgccgttgaggggaaaaccgccgccgagttgcaggcacagtcaccactggcattgtttgatgagctgggattacgtgcgcagcttagcgcctcacgcagccaggggttaaatgcgttaagcgaggcgattatcgctgcgacgaagcaggtttaagcacagaaccgggtcggataagacgttcgcgtctcatccgacctgattgtttaaccctgacgcgccgctttcgccatcatcttcttcagcgcatgagaaaccgcaacaaacccaaaggtggcggtcaccatcgttgccgcgccaaatccagatgcacaatccatccgcttcggcccttctgccgtggctttcatcgcacacaccgtaccgtctgactgcgggtacaccagcgcttcagtagaaaacacgcaatccacgccgagcttacctttactgtttttcactacgccaaaatcgcttttcaggcgctcgcgcaacttcgccgccagcgggtcctgaatcgttttcgccagatcggtaacctgaatctgcgtcggatcaatctgcccacccgcgccaccggttgtgaccagtgggattttattgcgccgacaataagcaatcagcgccgctttgggccgtacactatcaatggcatcaatcacgtacgaataacccacgctcatatactgcgctacgttatccggcgtcacgaaatcatccaccaccgttacacggcactccgggttaatctggcgaatacgctccgccataacttccgcttttgccagcccaacgttatcgcgcagggcatgaatttgccgattggtattggtgacgcacacatcatccatatcgataagcgtgattgcgccaatccccgtgcgcgccagcgcttccgccgcccaggaaccgacaccaccgataccaaccacacaaatatgcgcgtcagcaaacagttgcaacgctttttcaccatacagacgcgctgtgccaccaaaacgctgacgccatgcatcactaattaccacagacatagcacctcagaattaaaaagggcgaggttatccctcaccctaaacgcataaatgcctgatgcgctacgcttatcaggcctacataactcctgcaatattttggatttgcatgatttgtaggccggataaggcgttcacgccgcatccggcatgaacaacgcgcacttagtcaataatcaggatgtgaggttacccctcaccctgtcatatccgtaaaaacggcatacagaatatcacatcagccgctaaagacgttacctgcgcccggggcggttttcagcacccagacacgtccatagtggttgtaccaacctgcgcggtgtccggcttccggcccgatcccttgatagatatcgaagtgttggcctttgattgcaccaccgacatccagcgccaccatcagacgcagttcgtactgaccattaaatttgccgttattatccagcaacggcacttctgccagcaaggtagtacctggcggaataatggaacgatcagaggcaactgacgcgcgaccaaccagcggcaccgcacttgcccctttcaccggagcaaaagattgcggtttaaagaagacgaaagacgggttctgttccagcagctcgcgaacctcggcttcactgtgtgtttcgccccagtgacgaatcgcctgcatcgacatatcttcttttttcacttcgccacggtcgatcagcaccttaccaatgctgcgataggcatgaccgtttttccctgcatagctgaaaaagttaagcggactgccatcaccaaagtcgatatacccactaccctgcacatccataatgaagttatccatcagggagttactgtaagcgagaatatatttatcactcaatgcccccgcgtagatctccgcacgagacggcagacgaccacgttttggcggcatacggtaaataggatactggaactcgccctggcgggtatggcgcgcctgaattaccggcgtgtaataaccggtaaactgcacgttaccatagttgtcggcaccttccatctgccaggcatcaatgccgaactggcgcatattgcgggtatcaccgcctgcgcgcagccactcttgcaccgcgttataaacattactctggttgccatacagacgcggtgacgaattacggatatggttaatttgctcggcaaaatcaccggcgttaatcggcgcgccaacggcatctggctggttcaccagagagaaaggctgggtaaatttcccgtctttatattgctgtccgcgatcggttggtttggaagagcaggcggcaagcattgccacaaccgtgcccataagaaggtactttacccaacgtcctttcattgttctcttcttcaggttaaaaaataaggcgcaacgaagataacaaaccgccgcgtttaatgaaatgagcagcctctccctgacgcaaattttgcacaaaaaataggctttagtgatttgtttttgttcaaaatcatgccaaatccgtgatcggggtaaaaaaaaggttgcatgaaaacgcgagcggagtatagtgcgcatccacggacgcggggtggagcagcctggtagctcgtcgggctcataacccgaaggtcgtcggttcaaatccggcccccgcaaccaattaaaatttgatgaagtaaagcagtacggtgacgcggggtggagcagcctggtagctcgtcgggctcataacccgaaggtcgtcggttcaaatccggcccccgcaaccaatcaaatttgatgaagtaaaagcagtacggtgacgcggggtggagcagcctggtagctcgtcgggctcataacccgaaggtcgtcggttcaaatccggcccccgcaaccaattattgaacaccctaacgggtgtttttttgtttctggtctcccataaaaaagcgccattcagcgcctttttatcatccccttctcgccagcgtcgccccatcggcaaaatacgctttaatccccgcaagaatagactccgcaacttcctgctggaaagtcgccgttttcagtttacgctcttcctcaacgttactgataaacgccgtttcgaccagaatggagggaatatctggtgcctttagtacggcaaacccggcctgttcaacttgatttttatgcagcttgttgattttaccgagcttattcagtaccgctttaccaaacttcaggctgtcggcaatggtcagcgactgtaccatatcgaacatggtgtggtcgacatagcggtcaccgcttttgctcacgccaccaatcaagtccgaggcgttctgggtttgtgccagatattttgccgcagtactggttgcacctttggttgagagcgcaaacacagaggaaccgctcggctgacgactggtaaaggcgtcggcatggatagagacaaacaggtcagcacgctgtttctgggcttttgctacgcgcacttgcaatggaatgaagatgtcttcattgcgcgtcatgtacaccttcatattgccctctttctcgatcagagagcgcaaacggcgagctatttgcaataccacatctttttcgcgcgttttgtatttccccaccgcaccggagtcttcgccaccgtggccagggtcaagcataatgacaatcggacgatcgcgccctgctttacccggttgtggaccactttgcgctggcggcacctgcttttcgaggtcgcctttgttgtaatcctccagcagcgccagcagcgggtcctgcatatcctgtgcattggccggatagaggtccatcaccagacgctctttaaacccggcgaccggcgcaagggcaaacagctgcggttttacgttttgctttaattcaaaaaccatccgtacggtttgcgggtcaaattgcccgacgcgcgccgacttgatgaacgggtcgtctgcacgaatttgtgccgccatccccttgagtaccgagttcaggtttacatcttcgatatccaccaccacgcgttcagggttactcaacgcgaactgcttatatttcagctgacgatttgattccaccgtcacgcgggtgtagctggacgcaggccagacgcgcaccgccacgacctggctgaccgcagccagactgacctgacttacgctcaatagccacatggcacccgcgccttgcagtaaacgacgacggctgattgcagtgttggatcctgacatgcctctcccgagcaaaagaaatctaagctgtgtaacaagtaaacgactaatttgaccggaaactttagcgaaagacgcataatctgtcatctaataaacggtaaacattctttttatattcacggcattactgataaaaaagtcgctctcgcataaaatttacacttgcaccctgcgaaaaaacagaataaaaatacactaatttcgaataatcatgcaaagaggtgtgccgtggtaaaggaacgtaaaaccgagttggtcgagggattccgccattcggttccctatatcaatacccaccggggaaaaacgtttgtcatcatgctcggcggtgaagccattgagcatgagaatttctccagtatcgttaatgatatcgggttgttgcacagcctcggcatccgtctggtggtggtctatggcgcacgtccgcagatcgacgcaaatctggctgcgcatcaccacgaaccgctgtatcacaagaatatacgtgtgaccgacgccaaaacactggaactggtgaagcaggctgcgggaacattgcaactggatattactgctcgcctgtcgatgagtctcaataacacgccgctgcagggcgcgcatatcaacgtcgtcagtggcaattttattattgcccagccgctgggcgtcgatgacggcgtggattactgccatagcgggcgtatccggcggattgatgaagacgcgatccatcgtcaactggacagcggtgcaatagtgctaatggggccggtcgctgtttcagtcactggcgagagctttaacctgacctcggaagagattgccactcaactggccatcaaactgaaagctgaaaagatgattggtttttgctcttcccagggcgtcactaatgacgacggtgatattgtctccgaacttttccctaacgaagcgcaagcgcgggtagaagcccaggaagagaaaggcgattacaactccggtacggtgcgctttttgcgtggcgcagtgaaagcctgccgcagcggcgtgcgtcgctgtcatttaatcagttatcaggaagatggcgcgctgttgcaagagttgttctcacgcgacggtatcggtacgcagattgtgatggaaagcgccgagcagattcgtcgcgcaacaatcaacgatattggcggtattctggagttgattcgcccactggagcagcaaggtattctggtacgccgttctcgcgagcagctggagatggaaatcgacaaattcaccattattcagcgcgataacacgactattgcctgcgccgcgctctatccgttcccggaagagaagattggggaaatggcctgtgtggcagttcacccggattaccgcagttcatcaaggggtgaagttctgctggaacgcattgccgctcaggcgaagcagagcggcttaagcaaattgtttgtgctgaccacgcgcagtattcactggttccaggaacgtggatttaccccagtggatattgatttactgcccgagagcaaaaagcagttgtacaactaccagcgtaaatccaaagtgttgatggcggatttagggtaagcgatgaaaatcgtcggatgcgacatgcgtaacactcgtacgtcgcatccggcaattacgtttattcccgtgaactaaacaacgccgccagaccactgcgccgctcagtacgagtggcgattgccgcacttaatatgcgctcatcggcatacagcgacagacggcgacgcgcgcgggtcaccgcggtataaaccagctctcgcgttactaccggcgtgcgttggctcggcaaaatcaacgccgcatggtcgaactccgatccctgcgatttatgtaccgtcatcgcccacgtagtttcgtgctctggcaagcgactcggttgcacagacttaatattgccgtccggcatcgcaaaccagacgcgcgtcccctgcccgcgatccagcgcaataccgatatcgccattaaacaacccaagcgcgctgtcattacgggcaatcatcaccggtcgaccttcgtaccaacgagagtgcggatgacgatgaattttgcgcttctgttgcataaactgctcaattcgctcattcagtccagccacgccaaacggcccttcccgcagggcgcacaaaagctggtactcattgaacgcctgaatgattaaatccggctcggcacgcgcttgcagcagatccagataacgtccgtaacccgcaagagcttcctcaagcatcgcaatataatcttcgccgctctgtaaaagccgtttttcgatatcagtaaaatcctgctgaaaaacggttttcactgccgttttatcaccacggttgatcgccgcagctaactgaccaatgccagaatcgctgccgaaacgatagcttttttgcagcaggcagagactgtcgcgcaaagatgccgcttctgtgccggttcctgccggaacgtgagtccccgtcaggcggcttagctgcctggcacgctcggcggtaaagcccgcgttggcataagcgcagatatcgcccagcacagccccagcctcaaccgaggccagttgatcacgatcgccgagaaagatcactcgcgcatgatcgggcaaggcgtcgatcagtctcgacatcataggcagatcgatcattgacgcttcatctaccaccagcacatcaagatgcagcgggttaccggcatgatgacgtaaacgctggctacccggctgcgcgcccagcaatcggtgcaaagtgctggcatcttccggaatgcgtttcttttgttcatcggtcagcggtaactgtcgcaaagccttgccgagagattcggttaagcgcgcggcagctttacccgttggtgcagccagacggatacggcagcgttcgccgtcggccatttgaattaacgctgccagcaacttcgctacggtggtcgttttaccggtgccagggccgccggaaatcaccgagatccgccgcgtcagcgccactgccgccgcaactttttgccagttaatttcatcgcttactggaaaaagtttgtccagggtttgcgccagtagagcttcatcaacctcaatggcatgattcacttcgttgaaaaagcgtgccactgtgcgctcgttacaccacatgcgattcaaataaagacgatcgccacagaggatcatcggcgtgggttcatctcccctgctgaccgcttgagaagccagcaagcattcttcccaattttgtagctcaccgatttcactgacacaggtcgccaacagcggatgcgacgcctcgttattttccagtcgtgaaagcggcaaacaaacgtgtccctctccggcatcatgacttaacagtgccgccgcgagggtgacggcaggatgttcatctcccgccacggtcagggcaaattgcacatccagcgggcgtagctgtttgtgctccacagcttccagtaattgcttttgcaatttcattacgcctcctccagggtcataccggcaaacatctcatccatcagggcaatcaacccggcgttgggtcgggttgtgtaaatcccctgttgcggatgttctttatcaacgccacgcaggaacagataaataacgccgccaaagtggtgctcatagtcgtaatcagcaatgcgatggcgcagataacgatgcagcgccagggtataaagctgatattgcagatcatagcggtgtgcctgcattgccgctgccatagcctgttgggtgtaagccgaactgtcttcacccaaccagttggatttatagtcgagcaggtaataacgcccttcgtggcggaacaccaggtcgataaagccttttaacatgccacgtacctgcatgaactccagcggcgggcagcctgcggatagcgggtcaaactggcggattaacgtatcaagctgactggcgataagcggttcactaatcggcagataaaactccatctccacctgtttattgcgggcggaaagttgactcaggcttacgccggtttcattgagaggtgcctggaggacagccgtgatccactcggtcaataccggttcccactgcgattcaaagccgccgagttccagtttttcccgcacccagttcgggtcaaccggctgggtaaaatccaggtcttcaaacaaactgtgcaagaacgtccccggtgacgcaccgcgcggaaactgatgtggtgttaacgtcggttcttcaacgacgctggcaacgcctgcagcatcgacatccagccgaggcatcaaatcctgggcgataccgtgaccacgctgttgcaaaccagagtagctggtgacgcgccagttatcgccgggcaatcgttgtaacgtcttcgcattcagctctgctgtagaaacatcattaacctgccagggttggttatcaccagtttgtgccgtttgccaggcaatatcatcatcgcataacgcttcaatacaggtgcgaagccctgccgcatcttgcggttcccctttttgcagcaaacgcccgagcgcactttggtggacgtcggtgtcaccttttttatcgccacgacggcgcaccagcggtgcaacgccgagactgcaatgccaaaccgaacgtgtcagcgccacgtaaagcaaacgcagatcttccgccagacgttcggcctccgcgaggtcgacgctttctggcgcagcattaagatccagaactgcctcaaacgagtggcgatcgtgataaaacgcctgctcctggacgcggaaattggtgataaacggcagccagaccaatggatattccagccctttcgatttgtggatcgtgacaatctgcaccagatgtttatcactttcgagacgcatttgttggctggaggcattactgtctggctcgaggatatgttgcgataaccagcgtaccagcgcatgttcactttccagctgcgttccggcttcttgtagcagttcgctgatatgcaagatatcggtaagacgccgctcaccgcctgccgttgccagcaagttttcagcaatgttacgcgccgacatcagcgcccgcagcatcggcataacgccacgtttgcgccagatttgccgataaccatcgaactcttcgactaccacatcccacgcatgttcgtcattgttcagcgtttcgatatccagcgcgttcagccccatcattgacgttgccagcgcactacgcagggtgttctcacgttcgggcgtcatcaccgcctgcaacaaccaaagcatttcctgcgcttccagagtttcaaaaacactgtcgcggttcgaaaggtaaacggaagggatttccagcaacgttaaggcatcgcgcacctgggcggcctcctggcggctgcgcaccagcacactgatgtccgaagcacgcaccggacgcgcgtcgtcgccgttcatcagcaacgcttcgccccgctgtccggcttgtagccagtcgcggatttgcgcagcacatacctgcgccatggtactttgataatcgccaacgccgcagctttcgccttccatcagccacattttcatcgcaggctgtgtttcacctttaaatacaaaacgtaacgcctgatttttcccggctgatttcactggaataaacggtatttcgcgaaacatgaacgcgtcatcagtctggctgaaaagcttattcacgctgttcaccattcctggtgcggaacgccagttggtgtctaaagtgtagtgggcgtgaacttcgctacgcgccttcatataagtgaagatatccgcaccccggaatgcatatatggcctgcttcgggtcgccaattagcaacaatgcggtttccggctgatggtgccagatacggcgaaaaattcggtactgctgggggtcggtatcctgaaattcatcgatcattgccaccgggaatcgcgtacggatcgccgctgccaacacctcaccgctttcgctacgcagcgcggaatcgagccgacttaacatgtcatcaaaacccaattcgccacggcggcgtttttcacgcgctactgtttcgcggatctcagccaatgcgcgggtgatcaccagatcgcggatcgacaatggttctgcaagcagttgatcgatcgcctcaaacagtggatgtcgcggggtttcccccccggccttcgtgcgatcttctaagaaacgctgggagaatttttccagcgactccggcaactgataactgtttgtctcttcttctgcccaggcgctgatcttgtcgatccatttagcctgattgctacggttaaacttgcgtcgatcaataccagaagattcgatcagcgcatccagttcacccactgcgtcgcgccactgctgttttaccgtatcaatacgcgccacaatttgcgcgtgacgggaagccagcgtttcatcatcgggcggcggtgctttgataaccggcgcttcgccttgcagataacgattaatatcgcgcagcaacgcctgcggccctttccaggtttcaaagacgacctgggctatttcacgcggcagcgggtagcagtggcgacgccagaaatcggcgcaggcctggtagcgtagcagagactcatcttcaatcagctgctgctcaaacagcatgccggattcaaaggcattcaggttgagcatgcgctggcaaaagccgtgaatagtaaagactgccgcttcatccatctgccgttcggctaacaacaaccactgcgcggcttgcgctttatcgtcgatctcttccagcaggcgttcgtacagtggattgtcggtggtttcacgcagacaggcgatgcgcaactcgtggatattgctacggatacgaccgcgcaattctgccgtggcagcctcggtaaaggtgaccaccagcagttcttcaacggtcagcgggcggggaaaggcggcggaaccgcctagtccaagtaacaggcgcaaatagagcgccgcaatcgtaaaggttttgcctgtgccggcagaggcttcaatcaggcgctcaccctgtaagggcaagcgcaaaggatctagtgtctcggcgacatcactcattcttttcactcatcaggggcattgtttgctgcaacgcgctgacgttctcccacactttccagccttcagggtgtacatattcggctttcccgttctggctgccggaaatctgcgacagaatagccatgccttgcggctcgaccaccgcctgatggaagaaatcagcaagtttttgcggcgtcagcagttttatctgggccacgattttatcacgcgaatcgaagcgcatattgccgcgatcgaaatctttacttaacttcgatgcttcttcgccgagcgtttgcggtgcctgcagcatctgggtaattaccgcctgctggatttgcgcaaactcatctggcttcatcgctcgcaattttgcctctgcggttgggaaaaacgccttgtaacgctcccacaagaatgaaggctgtttatcattgctttgcaaaaggaagcccatgccccactgacgccccacgctcattggaaacgcaaacacggcatagcccaattgttcttcggtacgcaactgattgtagaaccacggctgtacgatctgccccaacagagagctataggctgagctggtgtattcatcgtagccagtcggtacaaataccgctgccagtgcggagtcggtgctgttaccggctttttcaaagatgacggattgttttttatcgaccactacatctttgtttcgacaccactctgaaccatcagcgcccaactgtttttgcacatcgcgtgccagcgttgttgcctgggcctcggtcatgttgccgataaccataaactctggtcgagcccctgattttaaggcgtcgcgataggccagcacctctttcaacgtaatggagggcaaaattttacgccgttcatctcgcgagaagtacggcacttgcgagagcatctgcgcgggcataatcgcctgctcaaacgctttacccttttctgcggaatccatcatctggttataccaggacttcgcctgctcaagctgatcttccgtagcggtatagctaaagtacccctcgagcaatgcctggaacagctgcggcagacgctgggtgtaaccattagcattaaccataaggccgttgttagcgttggtggaaaaacttatgccaccaaccgacgcctggttgcttaactgatcaagcgccagccctgcgagataatcattgagcgcaaacatcacctgattgcgggcgctgtccatggctttcggattacgcaaaatcaggctgacatcagctttgggctcgctggcaaaataacggcttggcgcatacaccacgcgcagattcgactcatcaacaatcagctctggatggtcgtatttcttctctgacttaatcagcgagaaatcatcaggaatataagggttaagctctggcaaagagagcgcaatgtcggcggcttttttctgccagtcggcgaaagtttgtgcgctgattttatcgacctgatacggcgcatcgacaaagtaagccgttttgttgtgcggctctttcgggctgatataccagatacgcgcattctgcggcgtcatcatcgccagacgttcctttactgctttagcatcgtaccgatcggcaatattgactgcatccagcgtatgctcaacaggaacgcgaatcatggtatctgccagccattcgacgtaatccatatcacgggtgatcgacggataacggaagtcgatatccagcacattcgccagttcatcgaagtattgtttatcaatgcctttttcacgtaacagattgagatagctaaaaattgccgccacaacctgatcgcgattagccaggcctttatcggttaaagacgcagagatcgctaatacgccgctgttgccgttgacgataggatcggagttggcgctaatgccctcaactaatccctgcttttgcagccagtcagaaagtgtacctgggctgcgattgccaatcagataggtaatcaattcatcggttttactacggaacttcgctgagttgttatcgatgcgaaactcaacgcgcaacactttacgcggcagcgcagggacgtaatgaatgataatgcccttttgcgcgtcggtgactaccggcacggtgatttccggttttttgctctctttgttcggcacgcgaccaaaggtgtccgccgccatttttgccaactccggcagcggtttattactgtaaataaccgccttcatcaaattggcggaatagtacttctcgtggaaatctttcagcgcctgctgcaccggattaccaggtttgtcgcttaaagtttcgaggttaccaccagaaaactttgaaccggggtgtgccgggttaatggtttctgcgctgacctgtgccatgcgcatcccgtcacgcgtacgcgccatggttaattcagcgttcaccgcattacgctcacgttcggcatatttcttgtcgagcaaaggttcagcaatagcatcggccaggcggtctaccgcaccaggcaaggcgtcgttctcaacttccagatagaaagccgtgcgatacggcgcagtgctggcattgtgactaccgccgtgcattttgagatattcggccagactgtcagcctgcgggtactttttcgaccccatcagactcatatgttcaaggtaatgtgccagcccctggtacgcctcgggatcttccagcgacccaacgggcaccaccagcgccgagagcgatttaactgcctgcggatcagaaaccagcaagaccaccataccgttatccagacgtatagcctgatactggcggttatctttatcacttttacggatggtttcctgaatcggctgccatcccgtttctgcctgacttaagggtgcccaaagggcaactaacaacaataatgctttgaaccaggtgctgcggggcattcacggacctcataatcaacttaattttctgtccagattcaacacgttaacgcaaatcatctgccagaatttaatcttgtgctgcacgagtcagcctatgtttatataaccatcagtccgtgactggtgcgcatcataaagtaagcggatagattgcgcaatttttatacagcactcatgactgattaaagcgaaacagcggtaacaggaaacgttgcgactgttcaacgatggcctccattgtctctggtgttaattgccgccagagcctttgataccagatatcatcaccttcgccacgcaccatcatgttgccttcgtaagcctgaaggaatttcgtacgggctttttgcaacgtggaatcgtcatccagcatggcatcgttttgcgcgtcataacaggtttttagccacgcgccgccactttcaggtaacaccagcaatggcgcggacattccttcacgatacccctcaatcagttgtgagaggtaatgcaaagcctgttcggctgcaagcggcggaaaacgccactcgccgtctttgcgtagaaaaaggcgactttcaccattaccaccgctggcacagtagacaaggtgttccagccaaagttgcattccctgggccacacttaataaagagggacgccagcgcaacaggccatccggctgcacctgcggcaaccagccagttatctgcacaccgttgcaggcgagatcaatttccatactctgccccggctggcgacaggcaatgactctgtcggcaagctgctgcatctcctggcactgtgtttcccagaaaatttcaccaaaagcgccatacggtaaatcccctgccgctcggaagcggcggaacaagcgttcggcatcatcctgctcaaccagtgcattcaataactgctgattgatttgataacggctaagtccttccagaataaatggctcggtgtcggggatttcgctgtcttcagtacggaagttcacctgcaaacgcatctggaaaaatgcccgcaccggatgtgcccagaatcgttgtagcgtttccagcggcacggtttccggtaaggtaaacggcagcggctgaacaaattcagaatgtgctttaccagcctggctggccgcaggtagccattcacgagcatagctttgtcgttcgcctggctggtagttttgtggatcaaacggcatccgggtatggaggcaagtaagatgcgcttttacccttgcctcgctttcatcacagttgagcgcttcatcgcccggtagataatgactttgcccgatgtagtcgatcagttcctgcaccagtaccgacgggaaacgctcactgttatcctgaatggaacgaccgatatagctgatatagagtttttgctgcgcggaaattaacgcttccaggaacagatagcggtcgtcatcgcgacggctacggtcgccacgcttcggtttctggctcatcaggtcaaagcccaatggcgcaagctgacgtggataaacgccgtcgttcattcccagcaggcaaaccactttgaacggaattgaacgcattggcatcagagtacaaatgttaaccggtccggcgagaaaacgctggctgatacgttcttgatccagacgctgtgccagttcatcacgcaatagtgacagcggcaccgcgtcgccatactgcgcacctaaaccttcggcgataatcgcctgccattgttgttcgatcagcgtcatcgccgcttcggtttccgcatccggcaggaagaaggcgttgagcatatcgcgacaaaccggcaaccactcttccagcggacgctcctgtgccagcccgcgacgccagatgtttagctgcattagcagtgaagccagatgccccaccagttctgcaattaagccgctcgattcatcataaggtagaaccgattgccactcgccctgcgcgctctccatcgcgtagcccaacaacatacgcgtcaggccaaatcgccaggtgtgttgtccggtggcggggagttccagctcgcgaacgttgtcgtcatctatgccccaacgaatgccggattcgttgacccactggcgtaaataacgcagcccttcttcggtgatgtcaaaccgcgccgccagcaccggcacatccagcaacgccagcacatcctctgacacaaaacgactgtcaggcagtgataacaggctgataaacgcttccagtaccggatgtgactgccgcgcacgacggtcggaaatggcgtaaggtaggtaacgatccgcaggtgcgctaccaaacacagcctgaataaacggactgtagctgtcgatatcagccaccatcacgatgatgtcgcgcggagtaagtgtcgggtcttcctccagcatcgccagcaggcgatcgtgtaaaacttcaacttcacgctgcgggctatggcaaacgtggaaggtgatactgctatccagtggatcaagcgggcgtttgttatcgctacgggaaaactcttcgatgttcacaccagcaacggcgcggttttccagttccagaatgtcagactgaatgttatgcagcaggttatctggcgtgacatcgacaaaggcgtccagctcctggctgctctccaggtcagaaaggagataaatgtagtcgcgcccaagcttaccccatgaagccagcagcgggttgccgacatcctgttcaccatcgctgttaaagagctgcccggcattttcgctatcacgaaatagcggcaattcgcgatcttcaaaactgtgtcgacgctgacgggtcagcagtttcgccagataagcaggatctttaatatcgccccagtaataacggcaggggttggtaaacaggagatggatttcaatatgtttacccagcgcctgtagcgcctggagataaacaggcggtaacgcggaaataccgcatataaagacgcgcgaaggtaaccccggcgggcaggtcgtcgcggactccagcgtttcgataaagcgctgatagagattggcgcggtgccagcgcggttgcccgagttgatgggtatattccaccagcgccttccacaacggggcttgccaggcctgtgcttctcccagcccttcaaccaaatgtcctgtttcccactgtgccagccagtccggacgatagaccagatactggtcaaacaggtccgccgcttttgaggaaagctggaacagttttcgcttgtcgctatcgtcagtcagataatgccgcaacagggtaaagtcttcgcgctccagcaattgcggcagcagagtcatcagtttccagctcatgctctgtttgttaaaggcgctctctttggggatttccggtaacacccggacgaacatatcccagataaagctcgctggcagcggaaaatcaatgtttgccgcaataccaaacttttgcgacagggtcatttgcagccactgtgccataccggtactttgcaccagaatcatctctggttcgaaaggatcgtccagccgttcgcgttcgacaataaactccatcaacgcttccagcacgtccagacgattggaatggtagacccttaacatagcggctcctgactactgacgattcgggcaatgcaggcgggtcatctcgccttctctgcccccgggtgaaactagcgtaacgctgatgctgacacatcccgcctgcgatgtctgcattcggttgacctgccagttggcaggtggcgaaatcgcgcgcagttgcgtttgctgccagccatgccgccagagctgttggtactggtttctgctggcaagactgttcattaatgttcgctggaaacccgataacgcagtgacaatcatcaccatcaacaccatcgccaacattacctccggcaggctaaagccttgttgattcttcagggaagctgacataacgccctctctttcagcggacaaaaatcgctccagccgcgtggcgaaaaaacaatgtttccatcaatgacttcgcctgttcgccacaacgaaacgccttcataaccggcaatcaataaggcttcattatctgccagtaaacgcaaacaaacctgggcatcggtttcagcgtactgcgagcactgaactgctggctgcgtctgccagcagtgcatttttccccacgccagcgccgactgaacgatggcctggcggcgcaatgactgactttccatgctcacgcgagaggcaaaactgcgatcctgttggctcattccttgtaatagcaaactacccaaaaccagcagcatcaggaccagagccagtgacgaaacacccttttcgcggttcacaggttgaatcctgtcacgctatagctggcattcaccacggtttgcggttcagacttactggcagcacgcatattaaccgtcaacaccggcgagaagccgctgacatcctgacgtacgacctgaaaagtgtcgataatgatggcatccggattagtgactttatcccagcccttaccttcacaggatgtcgcaccgcgtagcgtttccagcacatgctccttcagacgaaatccaatctggtcggactcttttaccggttcgcgatcccagataccgttactgttcgcatcccactgcacaatgacacagtcaccctgtccgacaatttccagcccttcgccggtacagatgccatgacaataacccgccctctggagatgcttcgcgacggtaaatacccgcagccagatttcatcttccagcgccagcttacgggtgctcgttaaactttcacgctgtaacgcaggcagaaagcgtgccgcccccagcaacaatacgctactgatcgccatagcaatcaacacttccagcagagaaaaaccttgctcttttacaggcatccttctgtttctccttgctgacaaagccggagtcttccccacggcgaaaccaccagccaccactcgcccgttgagtttttgaagcgaatatgcccggcccatgcggtattgcgcaggccaaagaaagcaagcgaaggtgtcaggtcgctcatttcgacttcgggccagcgtggcacaaagaccaatggtgaactgccatgacaggtattggccccagcagcggaactcacaaggcaccataacgtcccctccctgataacgctgatactgtggtcgcggttatgccagttggcatcttcacgtaaatagagcaaatagtcccgcgcctggctggcggtttgccatagccgttgcgactgctgccagtattgccagccatagagtccacttgcgcttagcatgaccaaaatcagcatcgcgaccagcgtttcaatcagcgtataaccacgttgtgttttcatgccggcagtatggagcgaggagaaaaaaagacgagggccagtttctatttcttcggcgcatcttccggactatttacgccgttgcaggacgttgcaaaatttcgggaaggcgtctcgaagaatttaacggagggtaaaaaaaccgacgcacactggcgtcggctctggcaggatgtttcgtaattagatagccaccggcgctttaatgcccggatgcggatcgtagccttcaatctcaaagtcttcgaaacggtagtcgaagatggattcgggtttacgtttgataatcaacttcggcagcggacgcggttcgcggcttaattgcagatgagtttgatccatatggttgctgtacagatgcgtgtcgccaccggtccagacaaaatcacccacttccagatcgcactgctgcgccatcatatgcaccaataacgcgtagctggcaatgttgaacggcaggccgaggaagacgtcacaggagcgctgataaagctggcaagagagtttgccgtctgccacatagaactggaagaatgcatggcacggtgccagcgccattttatccagttcgcctacgttccacgctgaaacaataatgcggcgcgaatccgggtcgtttttcagctggttcagtaccgtagtgatctggtcaatatgacgaccatctggcgttggccaggcgcgccactgtttaccatacactggcccgaggtcgccgttttcatcggcccattcgtcccagatggtgacattgttttcgtgtagataagcaatgttagtgtcgccctgcagaaaccacagcagttcatggatgatggaacgcaggtggcaacgtttagttgtcaccagcgggaatccatcttgcaggttaaaacgcatctgatgaccaaaaatggaaagcgttccggttccggtacggtcgtttttctgtgtgccttcgtcgagcactttttgcatcagttctaaatactgtttcatggttcctcaggaaacgtgttgctgtgggctgcgacgatatgcccagaccatcatgatcacacccgcgacaatcatcgggatggaaagaatttgccccatgctgatgtactgcacccaggcaccggtaaactgcgcgtcgggctggcggaaaaactcaacaatgatgcgaaacgcgccgtaaccaatcaggaacaaacctgagacagctcccattgggcgtggtttacgaatatacaggttgaggataataaacagcaccacaccttccagcagcagctcgtaaagctgtgatgggtggcgcggcagcacaccgtaagtgtcgaaaatggattgccactgcgggttggtttgcagcagcaaaatatcttctgtacgggagccagggaacagcatggcaaacgggaagttcgggtcaacgcggccccacaattcaccgttaataaagttgcccagacgcccggcaccaagaccaaacggaatgagtggtgcgataaaatcagagacctggaagaaggaacgtttagtacggcgggcgaagataatcatcaccacgataacgccaatcaggccgccgtggaaagacatgccgccgtcccagacacggaacagatacagcggatcggccataaactgcgggaaattgtagaacagaacataaccaatacgtcccccgaggaagacgccgaggaagcccgcatagagtaagttttcaacttcatttttggtccagccgctgcccggacgattcgcccgtcgtgttgccagccacattgcaaaaatgaaacccaccagatacatcaggccgtaccagtgaagcgccacgggtcctattgagaaaatgaccggatcaaactccggaaaatgcagatagctactggtcatctgtcaccacaagttcttgttatttcgctgaaagagaacagcgattgaaatgcgcgccgcaggtttcaggcgctccaaaggtgcgaataatagcacaaggggacctggctggttgccggataccgttaaaagatatgtatatgatccgcgctataaccctccgcgaatcagcccgcccatgccgcgacgctccataaaggctgcaacctgatggcgaacttcggtcgccagttgcgcttccagactacgctgcgcaagattttctgcttcggcataatcaatgcgccgcagcaggtattttgcccgcgctacagaacgtccgttcatagacagatggcgatacccaagcccaatgaggattgccacgcacatgggatcgcccgccatttcaccgcacaaacggagatcgattccatgtatttccgcttcccgggcgatcatcgccagagctcgtaacattgcaggatgaagactgtcataaatgttcgccacccgggtattgttgcgatcaacggccagaatgtattgagtcagatcgttggtgccaacagagatgaaatcgacccgctttgccagatgcggcagcataaataccattgacggcacttccagcatgatgccgatacgtggtttgggaatttcgtaaccgatcatctcctcgacttcacgtccggcacgttcaatcaggcggcgtgcttcatcaacttcatcgaggcttgtgaccatcggcaacagaatattcaggttgcccgtagcggcattagcacgcagcatcgcccgcacctggatcaagaagatctccggctgatcgagcgtaatgcgaatcccacgccaacccaggcatggattctcttcgctgatcggcatgtaaggcagctgcttatctgctccgacatccagcgtacgcaaggtgacgggtttatcattgaacatttgcagcatcccctgatactgcgccacctgttcttcttccgacgggaaaccactttgcagcatgaatgggatttcagtgcgataaagaccgatgccatcaatacggctgcccagtttttcttcatgttccgggcttaaaccagcattgagcatgacttttatacgctcaccgctttttaactgcgcgggtaaattgacgtcatcttccgccagacggctaagctcaatctcttcactaattagccgctgatattcttgcagcagtaccggctccggatcgaccagcaattcaccgcgatagccatcaacgatcagcgtcctacgatgcagcaccgaaggctgaatatccgcgcccatcacggtagggatccccagcgcacgtaccatgatcgcagcatgggagttggctgcgccatctcgcacgacaacaccgactaagcgatcctggggcagctcagcaagcgttgtcgctgacagttcatctgccaccagaatgaaacgttccggccaggcgttcggcccttgattagcgtcatcaagatgaaacagcaatcgctgacccagcgcacgtaaatcgccagcccgctctttgagatagttatcacttagcgcggcaaactgttcggcaaatttttcaatgaccgtttttaccgcccactctgccaccgagcctttatcaacctcggcaaacaattcgcgacgcagccgggtgtccgaaagcaggtgcgagtaaagatcgaaaatagccgccgtttctttttgtgcaccggcggcaaagcgtttgctgtagcggcgaaactcgtttgccgcttcttccagcgccccggtcagtcgttcgcgttccagagccggatccagcgttgatgcctgatacacctgttccattaaaggtaacgtggcatcctgccagccttcggcaatcgccacaccaggtgctgccggtaatgcgcggattcgcgtctggcgatattgcccaaacaaggcagtcaactgcgactgagaaagaatagctgccatctgggtggcaagcgtcaccaggaaggattcttcactttcgtcatactggcgcaactctcgttgctgtaccaccagtacaccaagcaactggcgacgttgaataattggtacgcctaaaaacgcgcggaaacgttcttcttttacggaggggatgtatttgaagctggggtgcttttgcgcatctgcaaggtttatcggttccgccagcctgccaaccaggccgacgatcccttcatcaaacgcgagcgttacagtgcgaccgcgtggttttttcagcccccgggtcgccatcaggtagtaacaacgtcgatcatgatcggccaggtagaccgaacagacctcggtatccatcgcaagacagatgtcggtaaccagaatatttaacgcctcattcaggcgtggtgcgctggctaccttttcgactatttcgcgcaggcgagtgagcataattggcgtgacttaacctcttttacgtcgataagcagatgcgttttgtggttttggcgtattttcctgcagtgacatcaccacactcgcgaactctttcattaccctacggtagacatcacgtttaaatgacaccacctgtctgaccggataccagtaacttacccatcgccagccgtcaaactctggtgtactgctggtttgcatattgatttctgcatcgccgctcaccagctgcaagagaaaccatttttgtttttggccgatacaaaccggcttcgtgtcccaacgcaccaaacgtttcggtaatttgtagcgcaaccagttacgcgttgaagcaaggattcgaacgtctttgcggcttaatcctacttcttcaaacaattcacggtacatcgcctgctctgcggattctccggggttgattccgccttgcggaaattgccaggagtgctgaccaaatcgccgggcccacattacctgcccctggcgattacaaatcacgatacctacgtttgggcggtagccatcgtcatcaatcaccggactacctcaaaataaagctttatatacgaatgattgtttcatactccaggaagacggtaaaccactctctgcagggcattacacactaataacaattgaataactcacagttatgtgcagagttataaacagaggaaggggtggatagccgtttttattcaccttttctgtggatagagttgtgaagaactacggaattactacgggaaaacccggagcattctgaataagcccgatatagacattttaaaatattcattatcagtcaatgcattacatgtaattttagtaatgaaaaagagtaattcgtgacccaggtcacacctctcatttacgggttggcgaaagatcaaccaatgccgtatttatccacagaatgtgccactaagttaagcactgaaccactaaaaactggagtttcgtcgcacgtcaaggctgtaaatggaaacagtagtggaggtttttcacagttatcccagctttctgtggataacatggtgtaagatcctgtttattttcagtgaccagatttggaaaacccgttgcagtgttgcgcaactcgattaccggcaacctaaaaagcaatataaatcagagaattgaacaacgcatgtggaaaaagttacactgcgaatattcggcacataattgctgtttgttttttaatcaaggtatcatgacatgtcccaacctcgcccactgctctctcctcccgaaactgaagaacagttgttagcgcaagcacagcaactttctggttatacattgggagaactggcggcacttgtcgggctggttacgccagagaatttaaaacgcgataaaggctggattggcgtgttactggagatctggctaggtgccagcgcagggagtaaacctgagcaagattttgctgctctgggcgtggaacttaaaactatccctgtggatagtcttggtcgtccgctggaaacaacattcgtttgtgttgccccgttaacgggcaatagcggggtgacctgggaaaccagccacgtgcgccacaaactcaaacgcgtactgtggataccggttgaaggcgagcgcagcatcccgctggcgcagcgtcgcgttggatcaccgttgctgtggagcccgaatgaagaggaagaccggcagctacgcgaagactgggaagaattaatggatatgattgttctcggtcaggttgagcggattaccgctcgtcacggggagtatttacagatacgaccgaaagcagcgaatgcgaaagcgcttaccgaagccattggtgcccggggcgaacggattctgacgctgccacgcggcttttatttgaagaagaatttcaccagtgcactactggcccgtcattttctgatccagtagccatcgctttgacctgccgctttccgggcatataattaccgcttcatttttttggcagggctttttagatgttatttgcatggataaccgatcctaacgcctggcttgcgctcggtacgctgacgctgctggagatcgttcttgggatcgacaatattattttcctttctctggtggtggcaaagcttcccacagcacaacgtgctcatgcgcgccgtctggggttggcgggagccatggttatgcgtctggcgctgctggcatcaatcgcctgggttacgcgcctgacaaatccgctttttacaatattcagtcaggaaatttctgcccgtgatttgattctgcttctgggtggcttgttccttatctggaaagccagcaaggaaatccacgaatccattgaaggtgaagaagaagggctgaaaacacgcgtttcatcattcctcggcgctatcgtgcagattatgctgctggatattatctttagcctcgactcggtgattacggctgtgggtctgtcagatcacctgtttattatgatggcagccgtggtgattgccgtaggcgtgatgatgttcgccgcgcgctcgattggtgattttgtcgaacgccatccttcggtaaaaatgctggcgctctctttcctgattctggtgggctttaccctgattctggaaagtttcgacatccacgtaccgaaaggttacatctacttcgcgatgttcttctctattgcggttgaaagcctcaacttgattcgcaacaaaaagaatccgctctgatactccgtacgctctcctgcgggagggcgtactcactccttttaccctcacagtttaagattttcctgctttcaagatatataacgtcggtttataaacagactattatcataggtaggccaaatgaggataaccggatgaaaaaatgggcagtaataatttctgcagtcggactggcgtttgctgtttccgggtgttccagtgattacgtcatggcgaccaaagatggccgtatgattttgaccgatggaaaacctgaaattgatgatgataccgggctggtgagttatcacgatcagcaaggtaacgcgatgcaaattaaccgtgatgatgtttcgcaaattattgaacgttaacaaataaggtcagcatccggctggccttaagatttttctctttcccttttcccttccctctgccatttttatattccttatgtcgtgattataaaaaggaaacggctatgcaatatcaccgtataccccacagttcgctggaagtcagcacgctggggcttggcacgatgacgtttggtgaacagaacagcgaagccgacgcccacgcacaactcgactatgccgtcgctcagggcattaaccttatcgacgttgccgaaatgtacccagtacctccgcgccccgaaacgcaagggttaaccgaaacctacgtcggcaactggctggcgaaacatggcagccgcgaaaagttaattatcgcctccaaagtgagcggaccgtcgcgcaataatgacaagggcatccgcccggatcaggcgctggatcggaagaatatccgcgaagcgctgcatgacagcctcaagcgcctacagactgattacctcgatctttatcaggtgcactggccgcagcgcccgaccaactgcttcggcaaactcggttatagctggacggattctgcgcctgcggtttcgctgctggatacgctggacgcactggcagagtaccaacgcgcgggaaaaattcgttatatcggcgtgtcgaacgaaactgcatttggcgtaatgcgctacctgcatctggcggacaaacacgatctgccgcgtattgtcaccattcagaacccttacagtctgttaaaccgcagttttgaagtaggtctggcagaagtcagccagtatgaaggggtcgaactgctggcctattcgtgcctgggtttcggcacgctgaccgggaaatatctcaatggtgcaaaacccgctggcgcacgtaatacgctctttagtcggttcacccgctatagcggtgagcaaacgcaaaaagccgtcgcggcgtatgttgatatcgccagacgtcatggcctggaccctgctcagatggcgctcgcgtttgtacgccgtcaaccgtttgttgccagcactctgctgggcgcaaccacgatggatcagctgaaaactaacatcgaaagtttgcatctggagttaagcgaagacgtattagctgaaattgaagcggtgcatcaggtttatacttatccggcaccataagattaacgccggttaaaaccggcgttaaatattaatgacggcgctgccagatccacagcgccgttattgccagcgcaaacagcgcaccgaagccaatgccaatgggcacgaccgggatgcctatcattaccgccagcgagtaaatgcccagcatcaacaacatggcgctgttttcgccaaggttttgtactgcaatcgcattccccgccccgacgctttttttaccccgctcctgtagcaacgcattgagcggaacgacaaaaaagccccccatcacgccaatcagcatcaacaaggcataggctggcagcagctcgtgttgcagggaaaaaatcagtaccaccacgccaatcaaaatcccggctggcatacagcgtgacacggtttccagcgtaactaacttcgctgccgcacctgcgccaaccacgataccaatcgctaccatcgcgttgagataggtgggcgtagcgttatcggtaatgcccagcgccaccggtacccacagcaccaacaggaaacgcagcgtgacacccgctccccagaataaactggtgcccaccagcgaaaaacgcgtttcaccattgcgccatagcgaggtgcaggcattcaggaaactgcgggtcatgttgatgagattccaggactgccccggacgcgccgccgccagtttgggaatgtagatattggcaacgaccgcaccaccgtaggccagtgcgcatgcggccagggcgacgaggacatgccagtcagccagcacaccaccggctacggaaccgagcaaaatcgccgctatggtagaagcttccattaaaccgttagctttcactaacttactacccgtggttaattcgccgagaataccgtatttcgccggtgaataggctgcagcaccaacacccaccagcgtatagccgagaaacggattgataccaaagcagatactggctgcgcccagcagcttcaggccgttggcaaacatcatcacccggcctttggcgaagctatccgccacctgcccgacaaacggcgcaaaaagaatgtaagcacctacaaacaccatttgcaggatgggctggctccactccggatagaactgcgctttcagtaacgccagagtggcaaacagtagggcattatcgccaaacgcagagagaaactgcgccacgataaccgctttcatccccttcgaccacaacgaagtgttagtgtgcactgactcactcatcgtgttgttccgcttcgtctacccagcttttcaacgtgacaaagtcaggtttgccgctgccaagtaatggcatctgtttcagatagcgaatatcgcgcggtacagcaagctccggcacgccgtgctcgcgggcatactgttgcaacttatcgcgcgtcagttcgttatctgtggtgaaaagcaccagtgcctcgcctttgctggcatcgctcttaatcgcagtggcatggactttatctggcgaaacaccaagtgccagttgttccaccatttccagcgacaccatttcgcctgcaattttggcaaagcgttttgcgcggccctgaatctgcacaaagccctgctcgtcaaaacgcacaatatcgccagtgtcataccagccgcgctccatttcgccgcgaacattctcggcggtgggcacttccagtacacctggcttctccacccgcagatagccgttcattatgttcggccctttcagttgcaggcgtccgccctcttcgataccagggaccgacaacaggcgcgcatccattcctggtagaatacgccctaccgtaccgggtttcgccgccatcggtacgttgatagaaacgacaggcgcgcattcggtcacgccgtagccttcaaggatgcgcaggccaaatttatcctgccaaagctgtttggtactttcttgtaatttttctgcgcctgccaccacatagcgtagacgatagaagtcatacgggttggcgaaacgcgcgtagtgaccgaggaaagtcgaggtgccgaacaacacggtgcaactgcggtcatacaccaactccggcacaatgcggtaatgcagcgggcttggataaaggaacacttctgcacctgtaagcagtggcgtaaacaggcctaccgtcagcccaaaggagtgaaacagcggtaacgccgacataaagcgatcgttggtggtgaagtcggcaatcgttttaatctgctcgacattcgccagaatgcttttatggctatggacgacgcctttcggatggccttcagaaccggaggtaaaaaggatcagcgcctcttcttccggctgctgtttaacctgtgccagacgcggcatcagcaaatgagcgaagatccatactttgtcggcagtggtgacatctgcttttaaatcttccagatagacccagcgcacctgagtaagttgctccggcagatgccagagtttgcctttatcgagaaactggcgggaagtgaagatggttttgatttcagccgccgtaatagcactggtcagcccttttaccccggcagtgtagttcatcattgcgggcatgcggcgacgggcgatggccccaaaaatcactgccgcactgatgcctgcattgggcagcattaagccgatgcgttcgccttcaacactgtatttttcaaggatgcgtccaacaaacagcgttttcgtaagcaatttgcgataggagtctggggtaaagttgacgtcttcgacacatttcttcccggctccgaagcggtacattgcactcagtaaagattcgtacagcgtttcacgcgggcgcaccgccattcgcgcttccatcattatttgatgcagcatttcgccagcgattttgcgacggtcacgggcacgcggcgcatccggcatcgccacctgcgttggtggcaaaatatgcagagtaatttgcgggaacaagcgacgtttaaccagacctttcaggcggctgaagtgcgtaagttccgccccttcaatacgcacaggaataaccgttgcaccagacttcgccgcgacaaaacccgcgccatcgtagattttcatcagcgagcctgtcgtggtgatgcgtccttcagggaaaatcaccactggtcggccctgttccaccagacgtaccagatgtttaatagccataggttgcgtcgggtcgagaggaacaaagtcgataaatgatttcagccaacgcatataccactgttggcttattgaggtgtaaacggcaaacactggacgcacaggtaaaaacagtccaagcaaaatgccatcaataaaagagacgtgattaggcgtaattagaacgcgctcgcccttcagtgcctgggtgtcacccgtaacgcgaacgcgatacaaaacacggcacaaatttcgaaaaaagctaaaaagcattccaactccctttgctctgattcagtaaaagcgaatggagggagattacacgagataaagaacgcgagcgacagtaaattaggtgcgaaaaaaaacctgcgcatccgcgcaggttggtgcaagagacagggtacgaagagcgtaccgaataatctcaccaatcaatacctctgggatcttgattgtggtctgcacgacgactcttcgccagcgagaaaacgcaaaggaatgaagggaaatgcaacgaggtgtgtaaattgtcggttactgttacagattgatgaccggcaaaaaaaacctgcgcatctgcgcaggctggtgtaattcatgtgctcaacccgaagttgacttcacctatcaatacctctgggatcaccactttagcaacctgaagccaaacgccaccagcggtcaatcgcaacagcgtttcgcaaagtgtaaccaaaggtttgcaatctctttttttgtcttacttatttgcgtttggctcacattcccacgatgaaaacacgccaccccttgaaccaacgggcgttttccgtaacactgaaagaatgtaagcgtttacccactaaggtattttcatggcgaccataaaggatgtagcccgactggcaggcgtttcagtcgccaccgtttcccgcgtcattaataattcacccaaagccagcgaagcttcccggctggctgtgcatagtgcaatggagtctcttagctatcacccgaacgccaacgcccgtgcgctggcgcagcagaccactgaaacggtcggtctggtcgttggtgatgtttccgatccgtttttcggtgcaatggtgaaagcggtcgaacaggtggcttatcacaccggtaattttttattgattggcaacggttaccacaacgaacaaaaagagcgtcaggccattgagcaactgatccgccatcgctgtgctgcgttggtcgtccatgccaaaatgatcccggatgctgatttagcctcattaatgaaacaaatgcccggtatggtgctgatcaaccgtatcctgcctggctttgaaaaccgttgtattgctctggacgatcgttacggtgcctggctggcaacgcgtcatttaattcagcaaggtcatacccgcattggttatctgtgctctaaccactctatttctgacgccgaagatcgtctgcaagggtattacgatgcccttgctgaaagtggtattgcggccaatgaccggctggtgacatttggcgaaccagacgaaagcggcggcgaacaggcaatgaccgagcttttgggacgaggaagaaatttcactgcggtagcctgttataacgattcaatggcggcgggtgcgatgggcgttctcaatgataatggtattgatgtaccgggtgagatttcgttaattggctttgatgatgtgctggtgtcacgctatgtgcgtccgcgcctgaccaccgtgcgttacccaatcgtgacgatggcgacccaggctgccgaactggctttggcgctggcggataatcgccctctcccggaaatcactaatgtctttagtccgacgctggtacgtcgtcattcagtgtcaactccgtcgctggaggcaagtcatcatgcaaccagcgactaaccgcagttaaagcaattccagcgccagtaattcttcgatggtctggcgacggcgaatcaaccgcgcctgaccattatcaaacagaacttctggtaacagcggacggctattgtagttggatgacattgatgcgccatatgcccctgtatcatgcagtaccagataatcacctgccttcacttccggcaaggcgcgggtttcaacatttcccccttcctgctgggtaaagacatcgcccgattcacataacggtccggcgacgacggtttccaccgttggcgcgtgttccagagaacgaccatcagctgccagggcactgatatggtggtaactaccgtacattgccgggcgcatcagatcgttgaacccggcatcaaccagcacaaagtggcggctccccatttgtttgacgctccgcacctgagtaattaatacgccagactgcgctaccaggaagcgacccggttcaatttccagtttcacagggtggcccaaatggcgggcgatttgctcacgcgcggcattccacagaccataataatgttcggtatcaaccgcctcttcaccctgttgataaggaacagaaagcccaccgcccgcagaaatagcctgtaaatcctgaccgaattcgatgacctgacgcaccatagcaccacacacctgttccagatgggcataatcaacgccagaaccaatgtgcatgtgaatgccgaccagctgcagatgatgacgttgtatcacgtccagtgcggcgggcagatcggtgtaccagataccgtgcttgctgttttcgccaccggtattggttttttggctatgtccgtgaccaaaccccggattaacgcgcagccatacccgatgccctggcgaaacctggcccagttggtcgagcatatcaacagaacccgcattcaccggaatttgcaattcactgacgcgttcaagcgtcgcctgatcgataacatctgccgtaaaaacaatatcatcggggtgcgtttgcggattgtaacccgccgccaacgcacgctctatttcgcctaacgagacggaatccactttcacgccctgctcacgcattaagcgcaaaatatgaatattggaacaggctttctgtgcaaagcgcaccacatcaaactgtttcagcgctgcaatctgccgacgaataatttgcgcatcgtagacccacaccgggcagccaaattcagcgggcaaacgcagcagattttcggcggtgagatcggtatcggtgctgaacagtgaatgtggcataacaaactccagataagtgcttttttatgattacgccacatcataaaaagaataaaaaatatcgatttatgtcgagtctatgcaaaaatgatatggattaccggattgcgagagagcgctaatggccgccgttaacttacgtcatattgaaatttttcatgcggtaatgaccgccggaagcctgactgaggcggcacacctgctacacacctcacagccaaccgtcagccgcgaacttgcgcgctttgagaaggtgatcgggctgaaattgtttgagcgcgtacgtgggcgattacatcctaccgtgcaaggactgcgtctgtttgaagaagtgcaacgatcctggtacggactggatcgcattgtcagcgccgcagaaagtctgcgcgagtttcgccagggagaactgtctattgcctgcctgccggtcttttcgcaatcttttttaccgcagctcctgcaaccctttctggcacgttatcccgatgtcagcttaaatatcgtgccccaggaatcaccgctacttgaagagtggctctcggcccagcgtcatgatttaggactcactgaaacgctccatacgcctgcgggaacagaacgtaccgaattactctctttagatgaagtgtgtgtgttacctccgggtcatccgctggcggtaaaaaaggtattaacgccggatgattttcagggtgagaactacatcagcctttcccgtactgacagctatcgccagttgctggatcagctatttactgaacatcaggttaaacgacgcatgatcgtagaaacccacagcgccgcgtcagtctgcgcaatggtacgggcgggggtaggtatttcggtggttaacccgctcaccgcactagattatgcggcaagcggtttagtggtgcggcggttcagtattgcggttccgttcaccgtcagcctgatccgccccctgcaccgcccgtcatcagcgctggttcaggcgtttagtgggcatttacaagcggggttaccgaaactggtcacttctcttgacgctattttgtcgtcagctacgacagcataaaagcgacagcatcctcggcatggatcgccgcggtatcaaacacaggcaaaacactgcgctcttctggcaccagtaaaccaatttctgtgcagccaaaaatgacgccctgtgcgccctgttctgcaaggcgagcaatcacttgcgcacaataagcgcgtgacgcttcggtaaattgccccagacacagttcttcaaaaataatctgattaattttcgcccgttcatccgcttcaggaataagacaattgatggaaaattgttccgtcagccgcccgcgataaaaatcctgttccatggtgtaacgcgtacccagcagcgccacacgagtcattccggccccggtaattgcacgtccggtggcatccgcaatgtgtaagaaaggcagagtgcaacgtgactcaatggcatccgccactttatgcatcgtattggtacatagcacaataccttctgcgcccgcccgctgtaagccaagcgccgcctcagccagaatgtccccggttttatcccattccccgcgacgctggcactcttctatttcatgaaaatcgacgctatgtagcagcacttgcgcagagtgaagcccaccaagccgctgtttaatgccttcatttatcaaacgatagtaaggaatggtggattcccagctcattcctcccagcaaaccaattgttttcattcctctctcctgatgtgtgttaccgcaacaaggctgaataaggaacgagacaaacgcctcaacggccaagtgcccaatctctattaacgaaaaaagggccggatgtacagcacatccggcccgtgaaatcagacgccgatatttctcaacttctcgcctgccatcagtttgcgttcgatatgttccagcgtgacatttttggtttccggaatgagccagaaagtaatgcccacaaacgcaatgttcagcgcagtgtagagccagaacgtaccggcagcgccaatgctatcaagcagtgtcaggaaggtcgcgccgataatcatattcgacacccagttcgtggtggtcgaacaggtaataccgaaatcgcggcatttcagcggctgaatttcagagcacaggatccacaccactggcgcggcgctcatcgcataaccggcaatacacatcatcgtcatgccaacagagagccaggacaagccactggaagccgtaccgttatcaaactgcatcaggcaatagcccagcaccagagtgcctaacgccatcacgctgaaaccaattttcagagccggtttacgccctgctttatctaccgtaaacaccgcaataaaggtggcgaacataaaggtcagccctacgaccagagtcgcaatcatctgttgttctgtggtcgtaaagcccgccattttgaagatacgcggcgcgtagtacatgatgatgttcataccggtaaactgctgcatcgcctgcaacaacataccgagaaacacagcacgacggacgttacggttgatcttaaacagtgcccaaccgccctgttttaacttcaggctttcacgaatttcgttgagttcttctcgcgctttttccgacgtatcgcgcagcatacgcaatacttcttccgcctcaatatgacgccccttttccgccagccagcgcgggctatttggcaggaagactaccagaataatcagcagaactgctggtaaagcaagaacccccaacattgcgcgccagttaccgctataactgaacgctgtatcggataaaaacgccagcacgatgccgagtgtgaccatcaactggtacatactgatcatcttaccgcgaacgttttcacttgccatttcagaaagatacagaggagcggtgtaagacgcgatcccgacagcaatgcccagcaccacacgagcggcgattaacatctctacgctggtcgcaaaagcggaccctatagaaccgagtacaaacaggatggcccccgccatcaggctgtatttacgccccaggcggaacgacagccaaccattaaacagcgcaccaattgctgcaccgagcatcatgctactaaccacccattcctgcaaacgactggtcagcacaaagtgatcggtaatgaacggcaacgctccggcgattacgccgatatcaagaccaaataacaatcctgcgaccgcagcagctaccgaaacaaacatattcatacgccgcgtatcccgcaaagaacgtggcgttaaagcagattccgtattgatagtaaccattttttcctgccagcagagagtaagacatagtgaaaaaatacgtgaacaactcacgcaggtgtcaggtcggaaacagcataaatatggattaaattgctgcgacatgtcgttatgtgatggatattccaattttcaaattaagttgaattattgagattattattaaccacctaattttacagcagataaaattcataaagttcattaattgataattaatatggattatttcataaccatgatatggattatgatgatctacaggtataaaaaaccctgccatgcggcagggtcataaaagtaagaagaatgaattaacgcgccagccaaccgccatccacggcaatggtataaccattcacataatctgaagcgctggaggcaaggaacactatcggccccatcaggtcactcggcagtccccaacgaccagctggaatgcggtcgagaatttccgcgctacgttgttcatctgcccgtagttgttgagtattgttggtcgccatgtaacccggggctatcgcattaacattaatgttgtgtttagcccattcgttcgccatcaatcgcgtcacacccatcacgccgctttttgatgcggtataagaaggcacacggatcccgccctggaaggagagcattgacgcgatattgataatcttgccgccattgccttgcgcgataaagtgtttcgccgctgcctgagacatgaagaatacgctcttgatattcaggttcatgacatcgtcccagtccttttcgctgaactcgagagcatcttcgcggcgaatcaatccggcgttattcaccaggatatcaatatgaccaaactccgctaccgcgcgatccagcagtgctggaataccatcaatctttcgcagatcggcggtcaggcttaaaaaacgacgccccagcgctgtgacctgctcgatggtttcagtcggttcaacgatgttaatgccaacaatgtcacagcccgcttgcgccagccccaacgccatcccctgacccagtccagtatcacaaccagtgacgaccgcaactttaccttcgagagaaaatgcacttaaaatcataacaataccttattcgtttatgcccacaactagcgcaaatctttaacggccacatggtccatatcatcaaagacctggttttcaccgaccatgccccagataaaggtataagctttggttccgacaccggaatggatcgaccagctcggggagatcaccgcctgctcgttatgcatcacaatatgacgcgtttcttgcggctgccccatcatgtggaaaacgcaggcgtcatcatccatattgaaatagaaataaacttccatccggcgctcgtgggtgtgacacggcatggtgttccacaagttacccggagccagctccgtcagccccatactcaattggcaggtttccagtacatccgggacaaaatatttgttaatcgtgcgacggttactggtgaggttatcgcctaacgtgactggagatacttcgtccggtgtgacttttttggtgggatacgtcgtatgcgcgggtgcgcaattgtaataaaacttcgccggagtgccggtatcaatactggcaaagacaacttcttttgcacctttaccaacatacagggcgtcgcggtgaccgatttcatagcattggccatcgacagtaatcgtaccggcaccgccaatattgataacacctaactcgcgacgttcaaggaaatagcttacgccgagttgtttaccaacttccccgccaacggaaaccgttttagttatcggcataatgccgccaacaataattcggtcaatgtggctgtaaaccatggtgtactcatcggcgacaaataccttttcaaccaaaaattcattgcgcagcccttgggtatccagcgtttttgcgtgcgcactgtggatgctctgtcttacgtccacatcaacctccgataatcagtgaagcgtgaaaatagaaaacgatagtgaaacactgtttcgttttctctataaagggatgatatgcccatgggctagggttttcaattaaaaataaaacaatgtttcatttttaagttaaggattaaaaaaagtgcagtgtcgatcacgaatatgtcatgagaatggaaaaatgagggagcccagaaaatgtatgtcgacttgccagccatcattattcaacagattaatgacggcagatatttatcggtaaggaggaaatgcagagctattcgtcacgttcaatggtcaatgccacaccctggcccccgccgatacaaagcgttgccagtcctttgcgggcattacgtttcaccatttcatgaaccagagaaaccaggattcggcaaccggaagcgcctatcgggtgaccgagtgcgatcgcgccaccattgacattgacccgacgctcatcccactcaagcatcttgccaaccgaaagcgcctgtgcagcaaacgcttcattagcctcgataagatcgacttcagccaactgccagcctacacgctccaggcaacggcgggtcgcatacaccggcgcaattcccatcaatgccggatctacaccaacgctggcaaatgcgcgaatgcgggccagcacgggtaaattcaacgctcgtgctttggcttcgctcatcatcattaccgcagctgcgccatcgtttatggatgatgcattacccgctgtcacagaaccgagactatcaaatgaaggatttaaacgggctaagccttctgcgctggcgtcagtgcgtggctgttcatcggtatcaacaaccaacgtctgcccgttactttgggtcattaccgggacgatctcatctttaaatcgtccggcgtcaatcgccgctcgcgctttttgttgcgagctaagtgcgtaagcatcctgcaactgacggctgatgccatattcgcgagccagattttcggcggtgacaccaatatgataatcattgaaggcatcccacaacccatcatgcacaagactgtcaaccaactggctattgccaagctgtgcaccggtgcggctatcagtcagaacatgtggtgcgcggctcatgttttcctggccaccggcgatgacaatatcagcctcgccacactgtatcgcctgagtagccagatgcagtgctttaagcccggaaccgcaaacgtcattaatagtgattgcagaaacgctattaggcagaccacctttaatagccgattgccttgccggattctgccctgcccctgcagtcaacacctgaccaagaattacttcatccaccgcatatgcaggaacgccggtacgttctattaacgctttcacgaccagactaccaagttccacggcggaatgacccgctaacgcaccacgaaagcagccgataggtgtccgtaacgccccgacaatcacaacgtctttcatcacaacctcgcaccaattaacagtgcaatagtaaatgattgttaattacagttatcttaattgtttaaaaaaagtgatttttatcacaaaggaaatatgcctgagcagcagtcagagacataactggcacgtaaggtttgcaaccactaacccaccaatagaggggtagatagggcgttaatctcccatacttaacctggtttatggtaaattgccctccattttgtttaatttgtagatgatacgttcagataatgtctaatatttggtctaaagaagaaactctgtggagtttcgcgctctacggcacagccgttggtgcaggcacgctcttccttcctattcagttaggttcggcaggggctgtggtcctgtttattactgctctggtcgcctggcctttaacatattggccacataaagccttgtgccagttcatcctctcatcaaaaacatcagcaggtgaagggataacgggcgcggtaacacactactatggcaagaagattggtaatctgattaccacgctgtacttcatcgccttttttgtcgtcgtgttgatatatgcagtggcaattaccaactcacttacggaacagctggcaaagcatatggttattgatcttcgcatccgtatgttggtgagtctgggtgttgtattaattctgaatctcatttttctgatgggacgtcatgccactattcgggtaatgggatttttggtattcccattgattgcctatttcttatttctttccatttaccttgtcggtagttggcaacctgatctattaacaacccaggtagagttcaatcagaatacccttcaccagatatggatatcgattcccgtgatggttttcgcctttagccatacgcccattatttctacgtttgccatagacagacgtgaaaaatatggcgaacacgctatggataaatgcaaaaaaattatgaaagtcgcttatctcatcatctgcataagtgtactgttctttgtctttagctgcctgctttctattccaccttcgtatattgaagctgctaaagaagaaggggtcaccattttatcggcgctttctatgctgccgaacgccccagcatggttgtcaatttccgggattattgtcgcagtagttgcgatgtcgaaatcattcctgggtacgtactttggcgttattgaaggtgccacagaggtcgtcaaaacaacactacagcaggttggtgtaaagaaaagtcgtgcatttaaccgcgcactatcaattatgttggtatcgctgattaccttcattgtttgttgcattaacccgaacgcgatttcgatgatttacgcgatcagcggcccgctcattgccatgatacttttcatcatgcctacgctgtcaacgtatctcatcccggcgcttaaaccctggcgttccatcggaaatctgattacgctgatcgtgggtatcctgtgcgtatcggtaatgttctttagctaatatcagttgtggatggttcaaaattgctacaattttgaaccattccatttttcataatattcatttgttattattccaccctatcacttctctcgtcatatcctagtattatcagttagttaaacacacaaagagatctgaacatcttaaataagactatttaagatgcataacttagattcgcaagatatcttctggtcattcaaaaacaatttgcgatatagatattcttataccatgagatagttatctggaccgctctcaaccatgcaagattaaatcagtgaaacataatcatatttgataacgagaaatgcatttttaaatgccttactcagaattatagcaaatacagattaatcgcaatttttcccggcaaaattacaaaatcatggtgtattgacatcatcaataaccaatgaaattatgcaattatatacggatagggaggttcttaacatggggctttgtagtcgttataaaagtcttacatgcaatagttgctcaatgcattgccaaataatgccagaagagtcaccgcgtttgcagtattgcgcaaactcgtgtttttgtatgtggcccgaagaaagttcatattttaatcgtggtgtggtagaaggtatcttaacaaaaaaccacaatgcgagattaagcggatatatttttgtcgatttttcagtaagttttttacgtctattccttgaaaaagactggattgactatcttgcaagtactgacatggggattgttttagtcagcgaccgcaatatgcaatcgttagctaattactggcgaaaacacaactcagcaatatctgctgtcatatataatgatgatggtcttgatgttgccaatgaaaagatcagacaactatttattggtcgttatttatcatttaccggaggtaacacattaactcagatggaattcaccataatggggtatatggtttctggttataatccatatcagattgctgaagttctggatatggatatccgtagcatctacgcgtacaagcaacgaatcgaaaagagaatgggtggtaaaataaacgaattatttattcgttcacattcggtccaacattgatactcaacgaccagccagaatcatactctgtttatacgggcatttattgaaatgtccgtattttataaataggccgtcccctcaagagtaaacaccatagtatttaaaaccatcacacgaaaaattcagaagcattacgaaatatgaatttacaaacaatagtggcataaatgttaaccatgttaatttacgtaaagttttacgttgcaacattaaagcctcatttcaatcatcatgataaatataaaattaatatatatttatgccgtaaataccaatatacttagcaaactatgtgatctccatttcgattgatttagtgtttattgacgtatgtactggattattaacgataatatcgagttctggcctgagcaccgaaaattaatatcggtacataacgccgatcttaacgtcgttctgacaacgccagccagtcgatgtttatcacttctacttgaagcttttcctgatgtggttgcacaacaagattttttcaccagagtctgggaagaagaaggtatgcgtgtgcctactaacacgttatatcagaacatatccattatcagacgcggatttcgcgctgttggtgatactacccactcgctaattgcaaccgtgccgagaagaggattcaagatccataatgacattaacatacaaaatcatgtaataaactcgtcaacagacgcacatacacacaatgccccacctgccataaaagttaatgcgggatacaaagagagcattggtggcgcaaagaatttcaataacaaaatcctcaaacatataaaaagtcatctaattatgttgagcgcatttgtcataggcgcatattctgcatattggctatggaataataatcaaccgaagccatttttcaaggattacaagactgttgcggaaattaatggctgccattttaatgtaacagaagatacaattgatgggttgaaagagttcgataaatataaaacacggatactggattcggggattaactgtaaaaaacatccgtggttatacttccctcttgcaaaatcctcaccggggatgattgttatggcatgcaataaaaactataaccaacatgaagtggcaaactgtttaaccctgtcttaccgtgaggttaatcgtgattgattataaaaaaaacttattatttattttagtttttatcagtgggtttattctcttcactgtctattcttacactgcagaaaaaatgatatataacgaaacatgcactgcaaattgggtaatttttaatgaccagggacgagcaaatcttaccatcgactttatgtataacaaaaaaaataaaacaggaactgttgcgttgagtggaacctggcaacaaggtaacagagaaagtaaatcaatacggcgaaatattgaatacacatggattgaaaactatgacacagcccatttaacatcaaagaaagttaataagtttgagattatggatcaagttgatgatgatagacttgcacaacttattcctgatttttatgtctttccagaaaaaagtgtaagctataatatactaaagcaaggtaagcatgcttttattttgagcattggtaacagagcaataatgcattgtgcaaggtaaactaaaatagataacaaaaagatggaacctcgttaatcataaaacaataaaattaaatattctcgcagtatatggcagtctaaagcatcaaagatttgatcaacatctttcattttagacatctccttgcaatgtaaaatatcatgtatcaacaacatctggtgcaaatccatgagtcgaactcgacattcatcttagctcgattattattccttcgtacagtcgatgtaaacaatacagaaagaggattattaagaaccagtttactcagtgaatcaatagaggaaaggactaacgtttctttaaaagaattgatttcatcatctgttaaactaaactcatcattgacagatcgtgagatataactgtttttaactttactctttacgttgactttattgacagaattaacattcacatatcttgaatttaatgtccatgatgttgtttgcgtgagaacattctcagcattaaggaatttttttaacggaatccttggtttctttttcgagtccgaatttacaatatcatgcatatagaccatttcatgaatctgcgaaaattcaatgtccattgtatacctcacatttttaccgtgactcgatgttactgttcaataatcaccttccatcaatactaaaattaatacccctaatgtgccgataacaaatatagtcattctacgtaacgtctccataaggtgatatttgacattatcagaagctgcgaattcggattttgctctaatcaaatgagagaaatgtaaaatgaagccacgaaatattaataatagcctaccactgcaaccattagttcctgatcaggagaacaaaaataagaaaaatgaagagaaatccgttaatccagttaaaatcacaatggggtctggtttaaattatattgaacaagaatctcttggaggaaaatatctaacacatgatttgtcaataaagatagcggatatttctgaagagataattcagcaagcaatattatctgctatgagcatatataaattttcgataacagatgatttaatgagtatggctgtaaatgaactcataaaactgaccaaaatagagaataatgtagacctgaataaattcactactatatgcacagacgttctatccccccgcgtcaccagacataataaagaaaaaaacaaacgacattctacccttctcaaaaatcccctttttaattttcattgaaaaaatggcaattgatactatgaatccaggtcatacacattaaggcatttatgtaatgtcgtaattaagataactaataaggtgaatattagtaaaacaactaatgatgttattagtttgtagtgaacagtacttttaccaataatgaaaaatataccataagcaatgcaagcttaaaactcataatttaaaaaagataaatataaaaatatcaatgagtcaatcaataataatttggcatcacgagacacatcacagaggaatattatgagcacagaaacaattgaaatattcaataatagtgatgaatgggcaaatcaactaaaacacgcattatcgaaaggagaaaatctggcattactacatggtttaactcctgatatccttgatagaatatatgcatatgcattcgactaccatgaaaagggtaatataacggacgcagaaatttattataaattcttgtgcatttatgcgttcgaaaatcatgagtatctaaaagattttgcatcagtatgtcagcccaaaaagaaatatcaacaagcatatgacctttacaaactaagttacaattacttcccgtatgatgactattcagttatttatcgtatgggtcaatgtcagattggggctaaaaatatcgataacgcaatgcaatgtttctatcacattattaacaattgtgaggatgatagtgttaagagtaaagcgcaggcatatattgaactcttaaacgataattcagaagataatggctaagcattacaatcatttggttaaatttgctggttatagtgcagttaaccactataaccagcacctcttatgttttcttaaatcagcatcttaaaacagttaagagcatactataaatcattatttttcaatgcgttagagaacaatctactttatcaaaattgaataaggctatttcagattacatcactgaattcctaagataaattagtgaacacaaccatagatatgtcaaatgtaatttcctgtagcgttaatgacacataaatatgaatagccataatttctattgcttaagcaggatgcaagaaaccaattttttcatagaggttaactaatggacttagaaaataaattctcatatcattttcttgagggattaacgctcacggaagatggaattcttactcaaggaaatgagcaagtttatattccacagaaagagttaggtgtattaatagtattacttgaatccgctggtcatgttgtactgaaagatatgatcatcgaatcagtatggaaaaatattattgttagtgacgagtccctgacaagatgtatctattctttgcgctgcatttttgaaaaaattggctatgatcgttgcatagaaacaatctaccggaaaggttatcgtttcagcgggcaggttttcaaaactaaaattaatgaagataatacttcagactattccatagctatattccctttcactacttcattgaatacactggatccattaatacttaatcaggaattagtgcaaatcatttcaaataaaaaaatcgatggtctctatacctatccgatggctgcgacaaatttttgtaatgatcacatatctcaaaattcattcttgagcagattcaagccagattatttcgttacaggaagaataaaccagaataatgcagtgaacactttatacattgagttgatcgacgctaaaaaccttttcctcatcgccagtaatcatctccctgttgatgaactacataatacatcacaatttattatagataatatccttcaaacggtacataaaccagaacgatctgtaagattagctaagcaggaccaaggatataagaatcattatttatcagatgaaatgttagccggaaagaaagaactttacgacttcacccctgaaagcatttacagggccatgactatatttgatagattacaaaataaaagtgatatacagacgctaaaaacagaatgttattgccttctagcggaatgccatatgtctttggcacttcatggaaaaagtgaacttgaacttgctgctcaaaaagcattagagcttttagattatgtatcagacataaccactgtcgatggaaaaattttagctattatgggactgataactggtctgtctggacaagcaaaagtatctcatatcttatttgaacaggctaagatacactcaactgatatagcctctctctactactatagggcactagtccactttcataatgaaaaaattgaagaggcaaggatttgtatagacaaatcactacaactcgaacccagaagacgaaaagcagttgtgataaaagaatgtgtagatatgtatgtgcctaacccgctcaaaaacaacattaaactctactataaagaaactgagagtgaaagccatcgagttataattgacaacattttgaaattaaagcagctgacgagaatttgtatgcgataaatttttattgacgcaattttattatttagatgtatgcaacttgttatttaaacaacagagataaaaatatctaagatattcaccttattgcaagatatttaaaatgctctagagttaaaagtatgatgtaaagaccattggcctggacaattaaaaaagggagctttatgactaatccaatcggtatcaataatttatctcaaagttcaaatatagcgaatgcaacgggtgatgaagtcgtatcattagataaacacatcaacaccagtgctactgatacagatcaaatacaagcatttatagtttcaacatggatggcgccttttcaaaatgatatgtattcagaagataatcctatctcaccttactataaaattgagtggtagacgattgaccaaataaatcataacgagatacttttataatagtatctcgttcctttcattcaatcctcacacatgaaaaaatatgcgctcaccaaaagttaaattcttaaccatcttcacgttttgtatatttattacaaaaatgtctttcgccagcaactcttgctctaatgaagcaggaacaatgttcagaatcgaaccaaatttaattaaagctatcgctcttgttgaaagcaatctaaaaaaggatagcataggcaagaacagagataagaataacaatataaagagtttagattattggttaatgcagataaaccagatgcatattcccctgttaaaaaaacgtggaataataaaagatgaacgagatttgttagataacccttgtctgaacattaaaataggaaccgagattttatataaccatttttcacgttgtggagtaacgtggcaatgcctggggacttataatgcgggttttgcaatggataaccaaaaaaagagacagcaatatgccccaaaatatatattgtatataccaggcttaatgaactagacaatcgtaaggcttcagcaaaatgagcctaaagcctcttttttttatatagtgcaaacacccatacgtaaagctgttttgatcaactcgataccactgtgaacatctaatttcttcatgatattgagtctatgagtttcgactgttttcctgcttaactgcaagaaattagcgatttctttgtttgttttaccatcagctatgagttgtaatatttctgactcacgatttgtaagttgattatcagaggaatacctggaagatattttttcacaatccatatgtacactatcaaaataagtgtaaccattactaatcgaatcaatagcacgatttagtttcgccgggtgactggttttccatacgcatcctttcgcacctgcttcaagcaattttattgaatcaatatacggcatctttgctacaaatgtaataatatgagcatctatcttatgcgatttaacccattttacgagttcggcccccatcattccacctgcaaattctcctaaaataaatatttaggctgtagatttgttacactccgctatagctttcttcagatctttatagcccccaacaacctcatataaatcaggataatgtccgagaaatccaattatcccatcaatcataaacggctgctgatctgaaactacaattttaatttttcccatatattcatcctgagtgtaaatgctttaacgcattcatttataatcatcccttccattattattataagcaaaatccaaagaatacattgatgaaataataatgaaatataattaaaaataaaatttttgcgtaaaaaaataccacaggcattaaaaaatcatgagatgattaaaatattacaattagattatattcaaatcattaaacttgagccagggagctataagtcctcagggcttgccaaaacagaattattcatatccaaagaatgtgtttcaaacattttttcaactaaataatgtctggcttgttcgcagatttcgttaaccttgtcaggggagaaacaatgattattaattaaatattgctcacaattatccacaaattcctgcggactaaattcagcaataaattgatcggtaaaaaacacaaaacgcttatcatcatgaaatgtaatatggacattccatattgatttgtcgacaaaatatgactctacttcaagagacttatctttgaaactggtaggtatatggagatttacaggacctgatattgatggtaattttgttacccaactttcaaaaattttgataaaaacatcaacttcttctgaaggttttaacaatatactcttcagatcgtttatcatgtttattcttttttttcaagttctgagcatagcaagcttatcaagggtataaaattatccatctcatcaataatgccttttgtatagccatcataataaccttgaataaatttttcttctctcttttcctcaatactctgaatttttgcggtggtttcaagaaggattttttctttaagagaaactatttctttcaatccatcagaaatttttcttttaatcacaacaccatttgcaggagattttatcaagctcatctctattttttttcgcataaaatgtaattctctctaaaagtgttgatgcaagtggtaacggcgattgtatgtggtcaacaaaatcaggaaataataaattaaatcgttgctgcattgccaatggttgttgccttatatagggtaacaacgttgaaaaaccacatgtgatgatattgtgatagttagcgatgccgggtttgtatcgtgccttttcatttatttccagcggtatagctgataaataatcccttagtacatcaggaaccttataaaaaaacccgcgttctgcaaacctttctcgataaaagtgacaaccactgagtaaacagatcaatggaagtaaattccaattgtttattggatttgcccctatatttccagacatctgttatcacttaacccattacaagcccgctgccgcagatattcccgtggcgagcgataacccagcgcactatgcggatgccattcgttataatgctcgaacgcctctgcaaggttctttgctgccgttaacccgtctggtttgggcatgatactgatgtagtcacgctttatcgttttcacgaagctctctgctattccgttactctccggactccgcaccgccgtgttcttcggttcaagtcccaacatccgggcgaactggcgtgtttcattagcccggtagcatgaaccattatccgtcagccactccactggagacgacggaagatcgttgccgaagcggcgttccaccgctcccagcatgacgtcctgtactgtttcactgttgaagccgccggtagtgaccgcccagtgcagtgcctcacgatcacagcagtccagcgcgaacgtgacacgcagtctctctccgttatcacagcagaactcgaacccgtcagagcaccatcgctgattgctttctttcacggccactctgcctgtatgtgcccgtttcgatggcggtacagcaggttttcgctcaagcaacagcgcattctggcgcatgatccggtaaacacgtttggcattgatcgcaggcataccatcaagttctgcctgtctgcgaagcagcgcccatacccgacgataaccatacgttggcagctctccgataacatggtgtatacggagaagcacatccgtatcatcagtgtgacgactgcggcggccatccatccagtcatcggttcgtctgagaatgacgtgcaactgcgcacgcgacacccggagacaacggctgactaagcttactccccatccccgggcaataagggcgcgtgcgctatccacttttttgcccgtccatattcaacggcttctttgaggagttcattttccatcgttttcttgccgagcaggcgctggagttctttaatctgcttcatggcggcagcaagttcagaggcaggaacaacctgttctccggcggcgacagcagtaagacttccttcctggtattgcttacgccagagaaataactggctggctgctacaccatgttgccgggcaacgagggagaccgtcatccccggttcaaagctctgctgaacaattgcgatcttttcctgtgtggtacgccgtctgcgtttctccggccctaagacatcaatcatctgttctccaatgactagtctaaaaactagtattaagactatcacttatttaagtgatattggttgtctggagattcagggggccagtctaaacttgctcttttcttctggtgtttatctttgaaagatttgtaggataaataacattaagtaaagccgcatcggcttctctgtaatgtttatctttttccagataacctggggattctccccctaaatcaagctgtaacgttattctttcataacctttatctatgaggtggttcaacctcgttgttgaaagagtttcatccagttcattgactttagcttcgcgtagtaaatcagagacaaaaacagagtctttcttcgagagtaggtttgacaaacgttccagtccagaggtcaccagtgcaacggaagatgtgtttaatcgggcatcttcttcccatgctcaggaatcttccataacatagaaattggctttatccagataagcaatcagcagcgcaaccgactttaatcggtcacctttttgccaatcttcagcgttaatagtaccagtgttgattgcttgtataaggagatcaaggtaaagacctaaagcatcattttgtttatggttccacagctgcggcttgccttcttcctgcacatctgccatcacgggggagttgctgtcaaatcggatatgcacagcattcatttgcacgggaattccatccagtcgttttgggttgctaatgacgtcctgcatccgcttaatctggtcgggcgtagacatataatcccacagggtgagcagaaccttttttgcggctacactatttccctgatctgatactaatgccatatagccccataaactatccctcaaccagacagcatcatagtgggtttctgccgctgttttgtcatcttcgaaagtagaagcaagaataaacgttccccagggtttctccgtcaacgttaactttcgtgtgttttctgttaatgttagcaatccttgaatttcgtctttggtatagtggctctttatttcattttgtaatttggctgagtgaatcagaagacgataattaggatacttatctggatttaacgataaataacttttatctgttgctgcccccgtggaattaagaatgttaaatacagattcactcgtcacttctgcccctgtcgcctggcatgtgccgcacgaaaatataccagcgagcagaagagttaatgcagatttccctttcataaaatattccatcaatcgtttgttaaaagcgtagataaccacttatttaacaacttgaaaataaggtgttttacctgggttgttacaaaaggattgcattgcgtaaacgctttttatttacaacaaaatggggaagtattacggcgaagataaattggagcgggcgaagggaatcgaaccctcgtatagagcttgggaagctctcgttctaccattgaactacgcccgcttcgagatgcgtaaggcattataaaccttacgctctccttagcaagtgccacgctgctgactgctgattaattcgccatcagcattttggcttgctgccctgaggcggcaagtaacgtagcggatcaattgccgttgcacggtaacgaatctggaaatgcaggcgaacagatgccgcatccgtgctccccatagtggcgattttttgcccagccttcacgctttgcccattatttaccagcatcgtgtcattatgggcgtaagccgtaatgtaatcttcactgtgtttaatcatgatgagattaccgtagccacgcagctggttgcccacatacaccacctttcctgcacccgcggcgtaaataggtgtaccccgtggagctgagatatcaatccctttattgccgccatctgctgtcgaatacggcatgataactttccctgtcgttggccataaccaacaacgttgccctactggcggccaggatgatttcggtaccgctgatgacggtgtaaccgatgcggttttggtcgttgatttggcggttgatttacgtgtaatactgctacttttcgccccacccagttttagtttctgaccaacttcaatggtgtaagggggggaaatgccgttcagtcgcgccagttcttttacgctggttcccgtggtgcgcgaaatacgatatagcgtatccccccgtttcacggtgtaaacggagccggaatacgttcctgtatcggatgatttgctacccgaacagcccgccaaaagcagtccaaccgataacaacatcacgatacccagagattttttattcaggcgtcccgcactcaaaatctttcctcgcttaaaaaacaagacgccttatcatagcagccagcctcttgatacccaatctcttgcttctggaaaaacgtggtaatagagaaagaggttaatttcatttggcaaagggaagtatcatcagcaaaatattcgctgtagaggtatcgaacttcctgactttttaccctatttcccatcctgatgcgtaataatcccaatttatcacattgattttatcgccactcatattgatacgtatcactgcccctattcagagtcctgtttcgtatcatatctgtgtttttttaacgtcatcacacttcctacctcccctaacgcttatcgtcgtttctggcgtaaatcttgcctgcttagactaaatctttgccataagaaccaaatgttcaaatcgaggggatttctatggaagcgcgggaagcaaccgctacgggtgaatcatgcatgcgcgtcgatgccattgctaaggtcaccgggcgggcacgatatactgacgattatgttatggcgggcatgtgttatgcgaaatatgtacgtagccctatcgcacatggttatgccgtaagtattaatgatgaacaagccagaagtttgccgggcgtactggcgatttttacctgggaagatgtgcctgatattccattcgctacagctgggcatgcctggacacttgacgaaaacaagcgcgataccgccgatcgcgcactgctaactcgccatgttcgtcatcatggtgacgccgttgccatcgtcgtggcccgcgatgaactcacggcagaaaaagcggcgcaattggtcagcattgagtggcaagaattacccgttatcaccacgccagaagcggcgctggcagaagacgctgcaccaatccataacggtggcaatttactgaaacaaagcacgatgtcgacgggtaatgtccaacaaacaatcgatgccgccgactaccaggtacaggggcactatcagacccccgttattcaacattgtcacatggaaagcgtaacatcgctggcgtggatggaggatgactcgcgaattaccatcgtttccagcacccagatcccgcacattgttcgccgcgtggttggtcaggcgctggatattccctggtcatgcgtacgagtcatcaaaccatttgtcggtggcggttttggtaataaacaggatgtactggaagagccaatggcggcattcctgaccagcaagcttggcggcattccggtgaaagtttcccttagccgtgaagagtgtttcctcgcaacccgtacccgccacgcttttaccattgacgggcaaatgggcgtgaaccgcgacggaacattgaaaggttatagtctggatgttctgtctaacaccggcgcttatgcatctcacgggcactccatcgcttctgcgggggggaataaagtcgcttacctttatcctcgttgtgcctacgcttacagttcaaagacctgctataccaacctcccctcggctggtgcgatgcgtggttatggcgcgccacaagtcgtatttgccgttgagtctatgcttgatgacgccgcgacagcgttaggtattgatcctgttgaaattcgtttacgcaacgccgcccgcgaaggagatgctaatccgctcacgggcaaacgtatttacagcgcagggttgccggagtgtcttgaaaaaggccggaaaatctttgaatgggaaaaacgccgtgcagaatgccagaaccagcaaggcaatttgcgccgcggcgttggcgtcgcctgttttagctacacctctaacacctggcctgtcggcgtagaaatagcaggcgcgcgccttctgatgaatcaggatggaaccatcaacgtgcaaagcggcgcgacggaaatcggtcagggtgccgacaccgtcttctcgcaaatggtggcagaaaccgtgggggttccggtcagcgacgttcgcgttatttcaactcaagataccgacgttacgccgttcgatcccggcgcatttgcctcacgccagagctatgttgccgcgcctgcgctgcgcagtgcggcactattattaaaagagaaaatcatcgctcacgccgcagtcatgctacatcagtcagcgatgaatctgaccctgataaaaggccatatcgtgctggttgaacgaccggaagagccgttaatgtcgttaaaagatttggcgatggacgctttctaccaccctgaacgcggcgggcagctctctgctgaaagctccatcaaaaccaccactaacccaccggcgtttggctgtacctttgttgatctgacggtcgatattgcgctgtgcaaagtcaccatcaaccgcatcctcaacgttcatgattcagggcatattcttaatccactgctggcagaaggtcaggtacacggcggaatgggaatgggcattggctgggcgctatttgaagagatgatcatcgatgctaaaagcggcgtggtccgtaaccccaatctgctggattacaaaatgccgaccatgccggatctgccacaactggaaagcgcgttcgtcgaaatcaatgagccgcaatccgcatacggacataagtcactgggtgagccaccaataattcctgttgccgctgctattcgtaacgcggtgaagatggctaccggtgttgcaatcaatacactgccgctgacgccaaaacggttatatgaagagttccatctggcaggattgatttgaggataacatcatgtttgattttgcttcttaccatcgcgcagcaacccttgccgatgccatcaacctgctggctgacaacccgcaggccaaactgctcgccggtggcactgacgtactgattcagctccaccatcacaatgaccgttatcgccatattgttgatattcataatctggcggagctgcggggaattacgctggcggaagatggctcgctacgtatcggctctgcaacgacatttacccagctaatagaagatcctataactcaacgtcatctcccggcgttatgtgctgcggccacgtccattgctggaccgcagatccgtaacgtcgctacctacggtggaaatatttgcaacggtgccaccagcgcagattctgccacgccaacgctaatttatgacgcgaaactggagatccactccccgcgcggtgttcgtttcgtcccgattaatggctttcacaccgggccgggcaaagtgtctcttgagcatgacgaaatcctcgtcgcctttcattttccgccacagccgaaagaacacgcgggcagcgcgcattttaaatatgccatgcgcgacgcaatggatatttcaacgattggctgcgccgcacattgccgactggataacggcaatttcagcgaattacgcctggcatttggtgttgccgcgccaacgccgattcgctgccaacatgccgaacagactgcacaaaatgcgccattaaacctgcaaacgctggaagctatcagcgaatctgtcctgcaagatgtcgccccgcgttcttcatggcgggccagtaaagagtttcgtctgcatctcatccagacgatgaccaaaaaagtgattagcgaagccgtcgccgcggcggggggaaaattgcaatgaatcacagcgaaacaattaccatcgaatgcaccattaacgggatgccttttcagcttcacgccgcaccaggcacgccgctctcggaattactccgcgaacaaggactgctaagtgtcaaacaagggtgctgcgtgggtgaatgtggtgcctgtacggtgttggtcgacggcacagcaatagacagttgcttataccttgccgcctgggctgaaggaaaagagatccgcacgctggaaggtgaagcgaaaggcggaaaactttctcatgttcagcaggcttatgcgaaatccggcgcagtgcagtgcgggttttgtacgcctggcctgattatggctaccacggcaatgctggcgaaaccacgcgagaagccattaaccattacggaaattcgtcgcggactggcgggaaatctttgtcgctgcacggggtatcagatgattgtaaatacagttctggattgcgagaaaacgaagtaaaaggatatccggcctgaattcaggccggattcactgaggttatgtgtttaacaactcatatttcttaatcttgcgatagagcgtagcaatgccgatgcccagttcatcagcaacttgcttcttgctgttatgacgtgaaagcgcctcgcggatcatttgcttttccatctcctccagcgccgtgccgcccgcatcatcgagtgacaggtgcgcctcactgacctctgttacatcactttgctccgttgtgccattattcagcagatttggcggcaatagcgtgctgtcgataacttcacctgaaggaaccacgttaaccagatattccatcaaattgcttaactcgcgcaggtttccgggccaacgatgcttacgcaatatttcgacgacatcgggagcaatgccaggataaaccgatcccagacgacgggtatgcagatgtaaaaagtaatgcaccaatagttcaatatcttcctgacgttcacgcagcggtggcagagttatcgggataacattaagtcggtagaagagatcttcgcggaatttaccttcggcaatgaactgggccaaattctgattagttgcagaaatgatgcgaatgtcgacttgtattgggctactggcaccaatcggcagaatttcacgtgcctcaatagcgcgcagtaatttagcctgcaacattaatggcatatcacctatttcatcgagaaacagcgtgcccgtattcgccgcctgaatcaaccctgttttaccgttggcagaagcgccagtaaatgcacctttaacataaccgaacagttcgctctccagaagctgctccggaatcgcggcacagttgatagcaataaagggtttattccgtcttccgctcaacttatggattgcacgggcgacgacttctttacccgtgccgctttcaccaaccaccataacgctggatgggctgggtgcaatacggctaatgagtcgttttaattgccgcataacacggcactcgccaaccaattgttcaatatgcggttcatcaggtgcatttgctacagaaaaactggtatgcgattggtgaaacgccattaaaaataattgtcggccctgaatgttatgcaattgaccaatgattaattcacttttatcgtcccatgaaacaatatgctgcatatgtccatgggtaaaattactctcaaatgttaatggtctgaaacggataggtttcccaataatattattttgcacaacaccaagtgtttttaaggcagtctgattaacaaactgaacccgattttcatcatctacaactaatacgccctgatccatattatcgatcatggtcgcaaatattttactgatgttatctcctggcccctgatcctccagaagtttcgaaacaaaaatggtggatatatggcgaacataatcagaaaattcgcgtaaattatcactgatatgctcttgttgctcgtgggtaacggcaatcaaacttatcaccccaacacaacgatcctgtaaaatgacaggcgtacccagaaatgctttttcgcggcaattttctttactatcgcaaccttcgcaaaggggatcgaagcgagactgtgtcacaactttttcagttttcgtttccaggacgtggcggagcaggcgtgagttgccgctcaactggcgaccaagaaacttcccatacgcgcccgttccggcaacgcgacacaagttttcatcaacgatctcaacctcaagctgcaaaacgctggcaagcattctggcaaaacgctgaattgtcggttgaatttgcatcaatactgactgcgtagtagcaagctccatagctttaccttccagacttacttaaaagtcgatcattgaagacgttgatggttcacagatcatgatgatattaactcaggcgaaattggctttgataaaaacataagatttttatcattttctaatgaaattatggaagagatatcacatttctatatcaatatgagaattacggcggtgagtttatcaaactgaagagagatagcctgcccctttatcttatttctgatacttagcagcaaataaataacgcgataaaaaaagccaaacgttttcgtattttacaaacaaccagaagctggcatcaatttgtgatcaaccccacacattatccgtcaaattagtcttttgcagccgcgcggataattctggcacacttattgttagtcccaggtatagctgtgaaaacaccaatcactttggcaagtcacagtgaaataaaccactttgcctgtcattccactaccgggactttatgatgaaaactgttaatgagctgattaaggatatcaattcgctgacctctcaccttcacgagaaagattttttgttaacgtgggaacagacgccagatgaactgaaacaagtactggacgttgccgcagcattaaaagcactgcgtgctgaaaacatctcaaccaaagtctttaatagtggattaggtatttccgtattccgcgacaactccacccgtacccgcttctcttatgcttccgcgcttaacctgctcggccttgcacaacaagatctcgacgaaggcaaatcacaaatcgctcacggcgaaaccgtgcgtgaaaccgccaatatgatctccttctgcgccgacgctattggtattcgcgacgatatgtatctgggcgcaggcaacgcctatatgcgtgaagttggcgctgcacttgatgacggttacaagcagggtgtactgccacagcgtccggctttagtgaacctgcaatgcgatattgaccacccgactcagtcaatggctgacctcgcgtggttacgtgaacactttggttcactggaaaacctgaaaggtaaaaaaatcgccatgacctgggcctactctccaagctatggcaaaccgctctctgtaccacaaggcatcatcggtctgatgactcgcttcggtatggatgtcaccctggcccatccggaaggctacgacctgatcccggatgtggttgaagtggcgaaaaacaatgctaaagcctccggtggtagcttccgtcaggtcaccagcatggaagaagccttcaaagacgcagacatcgtttatccgaagtcatgggcaccttacaaagtgatggaagagcgtactgaattgctgcgtgcgaacgatcacgaaggcttaaaagcactggaaaaacagtgtctggcacagaacgcgcaacacaaagactggcattgtactgaagagatgatggaactgacccgtgatggcgaagccctgtacatgcactgcctgccagctgatatcagcggcgtatcctgtaaagaaggtgaagtgactgaaggcgtattcgaaaaataccgtatcgctacctacaaagaagccagctggaagccttatatcatcgccgcgatgatcctgtcccgtaaatacgccaaaccaggtgcactgctcgagcaactgctgaaagaagcgcaagaacgcgtgaaataacccctcgggccgatcagctggtcggccctctatttccagaggccaaaaggataggatatgtccgttttctcattgaagattgatatcgccgataacaaatttttcaacggcgaaacatcaccgctcttttcgcaaagccaggccaaactggcgcgccagttccaccagaaaatagctggttatcgcccaacaccgctttgtgcgctggacgatctcgcaaacctttttggtgtgaagaaaattctcgtcaaagacgaatcaaaacgattcggtctgaacgccttcaaaatgcttggcggtgcgtacgccatcgctcaattattgtgtgaaaaatatcatcttgatatcgaaacgctgtcatttgagcacctgaaaaatgccatcggcgaaaaaatgactttcgcgaccaccaccgacggcaaccacgggcgcggtgtggcgtgggcagcacagcaactcggacagaatgcggtgatttacatgccgaaaggttctgctcaggaacgcgttgacgccattctgaacctcggtgccgagtgcatcgtcacggatatgaactatgacgataccgttcgcctgaccatgcaacacgcgcagcagcacggctgggaagtggtacaggacacggcatgggaaggttacaccaaaatcccaacctggatcatgcaaggctacgcaaccctggcagatgaagccgtcgagcaaatgcgtgaaatgggcgtaaccccgacgcacgttctgctgcaagccggtgtcggagcaatggccggtggtgtgctgggttatctggtcgacgtctatagcccgcaaaatctgcacagcattattgttgaacctgacaaagctgactgtatttatcgctccggcgtcaaaggcgacatcgtcaacgttggcggtgatatggccaccatcatggcaggcctggcctgtggcgaacctaacccgctgggctgggaaatcctacgtaactgcgccacccaattcatctcctgccaggacagcgttgccgcattaggtatgcgcgtgctgggtaatccgtacggcaacgacccgcgcatcatctccggtgaatccggcgctgtcggtttgggcgttctcgcagcggttcattatcacccgcaacgtcaaagcctgatggaaaaactggcgctgaacaaagatgccgtggtgctggttatcagcactgaaggcgacaccgacgtgaagcactaccgcgaagttgtctgggaaggcaaacacgctgtagcaccttaatcaccctattggaactgctccctgcaaaacggggagtaaaaaatctggagaaaaataatggctaagaatattccattcaaactgattcttgaaaaagcaaaagattaccaggcggatatgactcgcttcctgcgcgacatggttgctattcccagtgaaagctgcgacgagaaacgcgtagtacatcgtattaaagaagagatggaaaaagtcggcttcgataaagttgaaatcgacccgatgggcaacgttctcggttatatcggccacggcccgcgtctggtggcaatggacgctcatatcgataccgtcggcattggcaacatcaaaaactgggacttcgatccgtacgaaggcatggaaactgatgaactgattggtggtcgcggtacttccgaccaggaaggtggcatggcctctatggtttatgccggtaaaatcattaaagacctcggtctggaagatgaatataccctgctggttaccggtacggtgcaggaagaagactgcgacggtctgtgctggcagtacattattgaacaatccggcattcgcccggaatttgtggtcagtaccgaaccaaccgactgccaggtataccgtggtcagcgcggtcgtatggaaattcgtattgatgttcagggtgttagctgccacggttctgcaccagaacgcggtgataacgccattttcaaaatgggtccgattcttggcgaattacaagaactctcccaacgtctgggttatgacgaattcctcggcaaaggcaccctcaccgtttctgaaatcttcttcacatccccaagccgttgcgctgtagcagacagctgcgcagtttcaatcgaccgtcgtctgacctggggcgaaacctgggaaggcgcgctggacgaaatccgcgccctgcctgcagtacagaaagctaacgcggttgtttctatgtacaactacgaccgtccgtcctggactggcctggtttacccaaccgaatgctacttcccgacctggaaagtggaagaagatcacttcaccgttaaagcactggtgaatgcctacgaagggctgtttggcaaagcgccggttgttgataagtggaccttctcaactaacggcgtatctatcatgggccgtcacggcattccggtgatcggctttggcccgggtaaagaacctgaagcgcatgcacctaacgaaaaaacctggaaatctcacctggtgacctgtgccgcgatgtacgctgcaatcccgttaagctggctggcaacagagtaattactcttcacttattcccctccggttcgccggagggtttttggagtttgctatgcgcgtattgatcaaaaacggcactgtcgttaacgcagatggacaagccaaacaggatttgctgattgaaagcgggattgttcgccagttgggcaacaatatttcgccgcagctcccgtatgaagaaattgatgccactggctgttacgttttccctggcggcgtggatgtccatacgcatttcaatattgatgtcggcatcgcgcgcagttgtgatgatttttttaccggtacccgcgcagctgcgtgtggcggtacaacaaccattattgaccatatgggatttggcccaaacggctgtcggttacgccatcaactggaggtttatcgtggttatgccgcccataaagcggtcatcgattacagctttcacggtgtgatccagcacattaatcacgcaatcctcgacgaaatcccgatgatagtcgaggaaggactgagcagttttaaactctatttaacctatcaatacaaactcaacgatgacgaggttttgcaggcattacgccgcttgcatgaatccggcgcgctgaccaccgtgcacccggaaaatgatgcggctatcgccagcaagcgggcggaatttatcgccgcagggttaaccgcgccgcgctatcatgccttgagtcgccctctggaatgcgaagcggaagccatcgcccgcatgattaacctggcacaaattgccggtaacgccccgctctatatcgtgcacctgtctaacggcttaggtctggattatctgcgtcttgcccgtgcgaatcaccagccagtctgggttgaaacctgcccacaatatctcctgttggacgaacgcagttacgatacagaagatggcatgaagttcattcttagcccaccgctgcgtaacgtacgcgagcaggacaaactgtggtgtggcatcagcgatggtgcgattgacgtggtggcaaccgatcactgcaccttctcgatggctcaacgcctgcaaatttctaaaggcgatttcagtcgctgcccaaatggcttacccggtgtggaaaaccgcatgcagttactgttttccagtggcgtgatgacgggacgtataacaccggaacgctttgttgaattaaccagcgcaatgcccgccaggttgtttggcctgtggccgcaaaaaggattattagcgcccggttccgacggcgacgtggtgattatcgacccacgtcagagccaacaaattcagcatcgccatctccacgacaacgccgactactcgccatgggagggttttacctgtcagggcgcgattgtcagaaccttatcccgtggtgaaacgattttctgtgacggcacctttacaggcaaagccgggcgaggtcgtttcctgcgacgcaaaccgtttgtccctcccgtgctctaaccactgccagggatctatacacaatcaagaatgatgagtgaggaaaaatgagtaagaaaattgttctcgccctgggcgggaatgcgctgggcgatgacctggccgggcaaatgaaagcggtaaaaattacttctcaggcaattgttgatttaattgcccagggacatgaagttatcgtcactcatggtaacgggccgcaggtgggcatgattaaccaggcctttgaagctgccgcaaaaactgaagcgcactcgccaatgctgccgatgtctgtctgtgttgcattaagccagggttatattggttacgatctacaaaacgctttaagagaagaactgctttctcggggcattaataaacctgtagcaacgctggttactcaggtcgaagtcgacgctaacgatccggcattcctcaacccgaccaagccgatcggttcgttctttaccgagcaagaagcagagcaactgacaaaacagggttacactctgaaagaagatgctggtcgcggctatcgccgtgttgttgcctcgccaaaaccggttgatatcattgaaaaagaaacggttaaagctctggtagatgcaggtcaggtggtgatcaccgttggcggtggtggtatccctgttattcgtgaaggtaaccatctgcgtggtgccagcgcggttatcgataaagactgggccagcgcccgtttagcagaaatgattgatgccgatatgctgatcattctgactgcggtagaaaaagtggccattaacttcggtaaagagaatgaacagtggctcgatcgcctgtcattaagtgatgctgaacgctttatcgaagaaggtcattttgcgaaaggttctatgctgcctaaagtggaagctgccgcctcgtttgctcgctctcgcgcaggtcgtgaagcactgattaccgtattgagcaaagcgaaagaagggattgaaggcaaaacaggaacggtgatttgtcagtaatttaaaggccgggtgggtaataccatccggccaaagattgtcaagtaagtgcgctttgttgatgccggatgcggcgcgagcgccttatccgtcctacaaaacatcgcaaattcaatagattgcaatgcacttgtaggcctgataagcgtagcgcatcaggcaatttggcgtttgtcatcagtctcaggccgggtgggtaataccatccggccattttcatttaagccacttccagcacttcttttgtcgctttcacgccctgatgcatcaacatcattaacgcctcaagtacgccgccgccaatcgcccgggctttatcagaaacgctggtgaaatcagcggtttcaccacgaggatcgatatcaccaattttaaaaccaccaaccactgccaggccgtcgttcaacaagccacgcaccatccccgtcaacggtgctttaatttcatgctcaccaatccaggcaatcacatcgccctctttcaccagatcgcctaatttcacgttggatcgcataatgcctgcagcaggagcacggatcacccgtcgggtggtatgccccataatattgccaggaacaccggtattctcctgcgcacaaccagagtaaatcacctgaccgagccagtgcccgcgatttgtttcaattaccgcatgacaatccttcccagcagtaaagcccggcccaagcgcgattgttactggtgccatatctgcccgcgttcccaaattctgtttcgccagaatagcgtccaccacgcaaagcggtttcagttcatcaagcaatgaacaggcgggatctaccatcacaggaatgaatccgcgttcggtaagtttcatcgcttccgcagagctggttgccaggcgagcagtgacgccttcgaccgtcatttcgccatcgaacacggcctgggcaaacgccacggtacaacgaatcactgtcggtttttccacttccagcatgatcactttaaaacccgcatgatacagacgtagcgccacaccactggcgatatctcccgcaccgcgaatcaccaccagctggtgtccggaaggatgagaaggtttcatcatcagcccacccggcgcgttatttttcacctgtaatatttctgccagcacgctgatggcgatctcctgcggcgtttccgcacctatgttgtaaccaacgggcgcatgtaaacgggcaatatgttcttcagccacgcctttctcacgcaattgacgcaggaaaagctgaaccttgcgacgacttgccagcaaccccaaccatgcaatgggctgttcaatgagtttgtcgagggcttcacgatcctgattattcgtggcaatcaggacaaaattatcagggcgaatatccagtgcttccactgccgcaccaaacgactcagcatggagaagcgtggttgatggtgggaatagttcaggattgaggctttcgcgataaatatcagcaacggcaatatcaaatcctaatagcgccgcactctgggctatcgcccggttgacatgccccgcgccaatcaacaccagacgtggacgcataccatggacgctgataaatactgacattgcacctccacaatctgacccgacagcatccgcaccgttacgagccatacgtccatggaataatcgcggcttacgttcctgcaatgcctgaagcgactcttcaatcaccttccgctcaaccattccgccaccaattgtaccgacgatagaaccatcggcgcgcactaacatttgtgcagaatggcggggagtcgagcctcggctatcaacaatttgcgccatagcaaacggacaattttgctcttcgagttttgcagcctctgtgaaaatattcataccaacctcaatggatatcctttcagtaacccggaatacccgggccgctaattcacaaatctgcgcgcgattgcaggatgttcttgtatatcgcccagccagattgcctctacgtcgtgttgttgcagcggttgaaggagctcgctttgtgcaatcgcattctcacattgagaaaaacggttaatgaaccagactcgccgacaaccttgcggtacgtttttaaacgccccctgagggtggcgaaccagcgcaacgagatcgctcagttgcaaggttgcatcaggtgttaacccggtaatatcagcaaactgcgaccagcgatggacattttctgtgctcactttcgcgcccaaagtatgtcctcccatcacagcaatcacgcagcaactgcttttgggtatgcaaggttcgtgctcatcaggcgcttttaacggcattccacgcgagccatctgcttcaatgagaattacgtcacactctggtcgttgcaccagtgcatcaatcgcttctggcgtaaatccctgcacttttccctggttcgctttccagctgtgaaaacaaaatgaaatgggggatgtaagagacgcatgaggaagcatggcgggatcacgacagaaaaccacgggccagtgagacgttggcataaacatatgtgtcgtcgtcgtgattaacacacgcctgccgctagcctggagcagttctgccagccaaaaaagcaagctggttttccccccagcaccaacaacagaaatcacagtgggacgtttctgcgcacctaaatcaatgactaatgccgatgggtcaactatacttttcacgagtctttatgacctctctgggataaattatccccaacttaatccatcaggaagtaacgcaattatcaggcgttattagcccctataaataatggaaccactatgtcagccatcgactgtataattaccgctgccggattatcatcaagaatggggcaatggaaaatgatgttaccctgggaacagggaacaattcttgatacaagtatcaaaaatgcgttgcagttttgtagccgaattattttagtcaccggctatcgtggtaatgaactgcacgaacgttatgcgaaccagagcaatatcactattattcacaacccagattatgcgcagggtttactaacatccgtcaaggccgcagtacccgcagtgcaaacagaacattgttttctcacccacggtgacatgccaaccctcaccatcgatatttttagaaaaatctggtcgttacgaaatgatggcgcaatactgccactccataatggcatccccggccatccgattttagtgtcaaaaccatgcctgatgcaggcaatccaacgacccaatgtcaccaatatgcgtcaggcactccttatgggagatcattattccgtcgaaatagaaaatgcagaaataattttagatattgatactccggacgactttattacagcgaaggaaaggtatactgaaatttagaaaacgtagttaaacgattgcgttcaaatatttaatccttccggcactcattatcataatgataaggaatcactgattttgagaaaagagaaaaattgataaatgggctggcaataataattttcaggagtgattttaattctcatttagcacctgtgagttcattcacaaaaagcccttaagtttcgagccgcctcacatttttttatatttcccgccaaacctggcaagagtggtgcgattgttgctctatccccctaaaccaccggatttctcaacaccggtcactcaatgatatctgtataagctaaggagagggttatgggggatattatgcgtcccattccgtttgaggaacttttgacgcgcatatttgatgaataccaacaacaacgctcaatctttggtattcccgagcaacagttttactcacctgtaaaaggtaaaactgttagcgtcttcggtgaaacctgtgccactcccgtcggccctgccgctggcccgcacacgcagctcgcgcaaaatattgtcacttcctggctgactggcggacgcttcatcgaactaaaaaccgtccaaattcttgaccgcctggagctggaaaagccctgtatcgatgccgaagacgagtgctttaacaccgaatggtctaccgagtttaccctgcttaaagcctgggatgaatacctcaaagcctggtttgccctgcaccttctcgaagcgatgttccagccttctgattccggtaaatcgttcatctttaatatgagcgtcggttacaacctcgaaggtattaagcaaccgccgatgcaacagttcatcgacaatatgatggacgcatctgaccatccgaaattcgctcaatatcgcgatacgctgaataaattactccaggatgacgcatttttagctcgccacggattgcaggaaaaacgcgaaagcttgcaagccttacccgctcgcatccccaccagtatggtgcatggcgtcaccctctccaccatgcacggctgtcctccgcatgaaatcgaagccatttgccgctacatgctggaagaaaaagggctcaacacctttgtgaaacttaacccgaccttactggggtacgcgcgtgttcgtgagatcctcgatgtctgcggtttcggttacataggcttaaaagaagagtcatttgatcacgacctcaagctgacgcaagcactggaaatgctggaacgcctgatggcactggcaaaagaaaaatcactcggctttggcgtaaaactgactaacactctcggcaccatcaacaataaaggcgcactgcctggtgaagagatgtatatgtcaggccgtgcgctgttcccgctctccatcaatgttgcagcagttctctctcgcgcctttgacggcaaactgcccatttcttattccggtggtgccagtcagctgactatccgcgatatttttgatacaggtattcgccctattactatggcaaccgacctgctgaaacctggcggctatctgcgcttaagtgcctgcatgcgcgagctggaaggctccgacgcctggggacttgaccatgttgacgtcgaacgactgaacagactggcagcagatgcgttaaccatggaatacacccagaaacactggaagccagaagagcgtattgaagtggcagaagacctgccgctgaccgactgctacgttgccccctgtgttactgcctgcgctatcaagcaagatattccggaatacatccgtctgcttggcgaacaccgctatgccgacgcgctggaactcatctaccaacgcaacgctctgcccgccattaccggtcatatttgcgatcaccagtgccaatacaactgtacccgcctggattacgacagtgcgctgaatatccgcgaactgaaaaaagtcgcgctggaaaaaggttgggatgaatataagcaacgctggcacaaaccagccggttctggttcacgccatccggttgccgtgattggtgcaggtccggcgggtctggcagcaggttacttccttgccagagcgggccatccggttacgctgtttgaacgcgaagccaatgcgggcggcgtggtgaaaaatatcattcctcagttccgtattcctgcagagttaattcagcacgatatcgattttgttgccgctcacggcgtgaaatttgagtatggctgctcacccgatttaaccattgagcagttaaaaaatcagggcttccactatgttctgattgccaccggcactgataaaaatagcggtgtgaaactggcgggcgacaaccaaaatgtctggaaatcactccccttcctgcgtgaatacaacaagggtacagcgctcaagctgggcaaacatgtggtcgttgtcggggcgggtaacaccgcaatggactgcgctcgtgcggcgttacgcgttccaggcgtagaaaaagcaacgatcgtttaccgtcgttcactacaagagatgcccgcatggcgcgaagagtatgaagaagcgttgcacgacggcgtagagttccgtttcctgaataatccggaacgtttcgatgctgatggcaccttaaccttgcgcgttatgtcgcttggcgaaccggatgagaaaggtcgtcgtcgtccggttgaaaccaatgaaacagtaacactgcttgtagacagcctgatcaccgccattggtgaacagcaggatactgaagccctgaatgcgatgggcgtgccgctggacaaaaacggctggccagacgtcgaccataatggcgaaactcgtctgactgacgtctttatgatcggcgacgtacagcgcggaccatcctccattgtcgctgctgtcggaaccgcgcgtcgggcgaccgatgccatccttagtcgggaaaatatccgttcccaccagaacgataaatactggaacaacgtcaatccagcggaaatctatcaacgtaaaggcgatatctctatcacgctggtgaacagtgacgatcgtgacgcgtttgtcgcccaggaagccgctcgctgcctcgaatgtaactacgtttgcagcaagtgtgtggatgtctgcccgaaccgcgccaacgtctccattgcggtcccaggcttccagaaccgtttccagacgctgcacctcgacgcttactgtaacgaatgcggcaactgcgctcagttctgtccgtggaacggtaaaccgtacaaagacaaaatcaccgtcttcagcctggcgcaagactttgataacagcagcaacccaggcttccttgtggaagattgccgggtacgagtacgtctgaataaccaaagctgggtgttaaacatcgacagcaaaggtcagtttaacaacgtaccaccggagctgaacgatatgtgccgcatcatcagccatgtccaccagcatcatcattatctgctgggccgcgtggaggtgtaatcatgttgattctgaagaatgtcactgcggtacagctacacccggcaaaagtgcaggaaggcgttgatatcgccatcgaaaacgatgtgattgtcgctatcggcgatgccctgacgcaacgctaccccgacgccagcttcaaagagatgcatggccggattgtgatgccagggattgtctgctcgcacaaccatttttactcggggctttcccgcggaattatggcaaacatcgccccttgcccggatttcatctcaacgctgaaaaatctctggtggcggctcgatcgcgcccttgatgaagagtcgctctattacagcggactgatttgttccctggaagcgattaagagcggatgtacatcggttatcgatcaccatgcctctccggcgtatatcggcgggtcgctctccacattgcgcgacgcatttttaaaagttggcctgcgcgcgatgacctgttttgaaactactgaccgtaacaacggcatcaaagagttgcaggaaggtgtagaagaaaacatccgtttcgcccgtttgattgatgaggcgaagaaagcgacaagcgagccgtatctggtggaagcacatatcggtgctcacgcgccgtttaccgtgccggatgccggtctggagatgctgcgtgaagccgtgaaagccacaggccgtggtttgcatattcacgctgcggaagacctttacgacgtttcctacagtcaccactggtacggcaaagacctgctggcacgactggcgcaattcgatctcatcgacagcaaaacgctggtcgctcatgggctgtacttgtcgaaagatgacatcaccctactcaatcagcgcgatgcgttcctggtgcataacgcccgttcaaacatgaacaaccatgtcggctacaaccatcaccttagcgacatccgcaatctggcgttgggaacggacggcattggttcggacatgtttgaagagatgaaatttgccttctttaaacatcgcgatgcgggtggtccgctgtggcctgacagttttgccaaagccctgactaacggtaacgaactgatgagccgcaactttggcgcgaaatttgggcttctggaagccggttacaaagctgatttaaccatttgcgattacaactcgccgacgccgctgctggcagacaatatcgccgggcatatcgctttcggtatgggctcaggcagcgttcacagcgtgatggtcaatggtgtgatggtctatgaagaccgtcagtttaacttcgattgcgattccatttatgcacaagccagaaaagccgctgccagtatgtggcgtcggatggatgcgctggcataaatgacagatgccctcttcccgcagggaagagggttaaataaggaaagaagatgattgaacaatttttcaggcccgactctgtcgaacaggcgctggaactgaagcgccgctaccaggatgaagccgtctggttcgccgggggcagcaaactcaatgctacaccaacccgtaccgataaaaagattgccatttccttacaggatctggaactggactgggttgactgggataacggtgcactgcggattggcgcaatgtctcgcttgcagccactgcgtgatgcgcgatttattcctgcagcgctgcgtgaagccctcggttttgtttactcacgccatgttcgtaatcagtcgaccattggtggtgaaatcgccgcccgccaggaagagtcggtgctgcttcccgtcctgttggcactggatgctgaactggtttttggcaacggcgaaacgctgtcaatcgaggactacctggcctgcccatgcgatcgcctgctaaccgaaattatcattaaagatccgtatcgcacctgtgcgacccgcaaaattagccgttctcaggcaggtttaaccgtcgtgacggcagccgttgcaatgacagaccacgacggtatgcgaattgcgctggatggcgtcgccagtaaagcactgcgtctgcatgatgtcgaaaaacaaaatctggaaggcaatgcacttgaacaggctgtcgccaacgccattttcccgcaggaagatttgcggggcagcgtggcctataaacgctatatcacgggagttctggtagccgacctgtatgccgactgccaacaggctggggaggaagccgtatgatcatccactttactttaaatggcgcgcctcaggagctaaccgttaatccaggcgaaaacgtgcaaaagctgttgtttaacatgggaatgcactctgtacgcaacagtgatgatggtttcgggtttgccggttctgacgcaataatctttaacggtaatatcgttaacgcgtccttgcttattgccgcacagttagagaaggcagatattcgtaccgcagaatctctgggcaaatggaacgagttaagtctggttcaacaggcaatggttgatgttggcgtggtgcagtctggttataacgatccagctgcagctctgattatcaccgatcttctcgatcgcatcgccgcacctacccgcgaagagatcgacgacgcgctttctggtttgttcagccgcgatgctggctggcagcaatactatcaggtcattgaactggcggttgcacgtaaaaataatccgcaggccaccattgatatcgctccgactttccgtgacgacctagaagtcattggtaagcattatcctaaaactgatgccgcgaaaatggtgcaggcgaaaccctgctatgttgaagaccgcgtaacggctgacgcctgcgtcattaaaatgttacgtagcccacacgctcacgcactgattactcatctggatgtcagcaaagctgaagccttaccgggcgtcgttcacgttattactcacctgaattgcccggatatctactataccccgggtggtcagagcgcaccggaaccgtcaccgcttgaccgccgtatgttcggcaagaaaatgcgtcacgtcggcgatcgtgttgctgcggtcgtcgcagaaagtgaagaaattgcgctcgaagcactgaagctcatcgacgttgaatatgaagtgcttaagccggtaatgtcgatcgacgaagcaatggcggaagatgcgcctgtcgtgcacgatgaaccggtggtgtatgttgctggtgcgccagatactctggaagacgataacagccatgcagcccagcgcggcgagcatatgatcatcaacttcccgatcggttctcgccctcgcaaaaatatcgccgccagtattcatggtcatattggcgatatggacaaaggctttgccgatgccgatgtgatcattgagcgaacctataactcaacgcaagcgcagcagtgcccgactgaaacacatatctgctttactcgtatggacggcgatcgtctggttatccacgcctccacccaggtaccatggcacttacgccgccaggtcgcgcgcctcgtgggcatgaaacagcataaagttcatgtcattaaagagcgagttggcggcggttttggttccaaacaggacatcctgctggaagaagtgtgcgcctgggcaacctgcgtgaccgggcgtccggtactgttccgctacacccgtgaagaagagtttattgctaacacctctcgtcacgtcgcgaaagtcaccgtcaaactgggagcgaaaaaagatggtcgcctgacggcagtgaagatggatttccgcgccaacactggcccttacggcaaccactcactcaccgtaccgtgtaacggaccggcgctgtcgctgccgttatatccgtgcgataacgtcgatttccaggtcaccacctactacagcaacatttgcccaaatggtgcttatcagggttatggcgcaccgaaaggtaacttcgctatcaccatggcattagcggaactggctgaacagttacagatcgaccaactggaaattatcgaacgtaaccgggtacacgaagggcaagagctgaaaattctcggtgcaatcggtgaaggtaaagcgccgacctccgttccttccgccgccagctgtgcactggaagagatcctgcgtcagggtcgcgagatgatccaatggtcgtcaccgaaaccgcaaaatggtgactggcacatcggtcgcggcgtcgccattatcatgcagaaatcgggtatcccggatatcgatcaggctaactgcatgatcaaactggaatcggacggcacctttatcgttcattctggcggtgcggatattggtactggtctggatactgtagtgacgaaactggcagcagaagtgctgcactgcccaccgcaggacgtgcatgttatctccggtgataccgatcatgcgttgtttgataaaggcgcatatgcctcgtccggtacttgcttctcgggtaacgcggcgcgtttggcagcggaaaatctacgggagaaaattctgttccacggcgcgcaaatgttgggtgagccagtggcagatgttcaactggcaacgccgggcgtcgtgcgcggcaagaaaggcgaagttagtttcggggatattgcccataaaggcgaaaccggcaccggctttggttcactggtgggaactggcagttatatcacgcctgatttcgccttcccgtatggcgcaaacttcgctgaagttgccgtcaacacgcgtacgggtgaaatccgcctggataaattctacgccttgctggactgcggtacaccggtcaatccagagttagcgttgggacaaatctacggtgccaccctgcgtgctatcggccacagtatgagcgaagagatcatttatgacgccgaaggtcacccgttaacgcgtgatttacgcagttacggcgcaccgaaaattggtgacattccgcgtgatttccgcgctgtgctggtgccgagcgacgataaagtcggcccgttcggggcgaaatcgatctcggaaatcggtgtaaatggcgcagctccggcgattgctaccgcaattcacgatgcatgcggcatctggttacgcgaatggcatttcacaccggagaaaatactcactgcgctggaaaaaatataaataataaatggccgcttcggcggcctgtttctctgtttgaacgatgactaaatagtgactgcgaaaatgagataagccgttctcaaggcgtcctgcgccccaaattcgtgggaatttattttactaattcagatgatcaaatttactttaaaaggagtgaagggatgtctgatataaaccatgcaggttctgaccttatatttgaactggaggatcgccctccctttcatcaggctctcgttggtgccattacccatctgttggcaattttcgttccgatggtaacccccgcgttaatcgtgggtgcggccttacagctttccgctgaaacaactgcctatcttgtttctatggcgatgatcgcctctggtattggtacctggttacaagtaaaccgctacggcatcgtcggttctggcctactctcaattcagtcagtcaatttttcatttgttacggtcatgattgcgctgggcagcagcatgaaaagcgacggttttcacgaagagttaatcatgtcgtcgcttctcggcgtctccttcgttggcgcatttctggttgtcggatcttcatttatcttgccctatttacgtcgggttattacgcctaccgtcagcggtattgtggtactgatgatcggcttaagcctgattaaagtcggcattatcgattttggtggaggatttgcagccaaaagcagcggtacgttcggcaattacgaacatctcggcgttggtttattggttttaattgtggtgatcggctttaactgctgtcgcagtccgttgctacgcatgggagggatcgccattgggctatgtgtcggctatatcgcatcgttatgcctgggcatggtggatttcagcagtatgcgcaatttgccgttaatcaccatcccgcatccgttcaaatacggctttagttttagcttccatcagttcctggtggttggcacgatttatctgcttagcgtgctggaagcagtcggcgatatcaccgccacggcaatggtttcccgccgccccattcagggggaagagtatcagtcccggctgaaaggcggcgtgctggcagatggtctggtttctgttatcgcctccgctgtcggttcattaccattaaccacgtttgcgcaaaataatggggttattcagatgactggcgtcgcttcacgttatgtcgggcgaaccatcgcggtaatgctggttatcctcggcttatttccgatgattggcggcttcttcacgaccattccctcggcagttctgggaggcgcaatgacgttgatgttttccatgattgccatcgcagggattcgcatcatcatcaccaacggtttaaagcgccgtgaaacacttattgtcgccacttctttaggtttagggcttggcgtctcctacgatcccgaaatttttaaaatattgccagcctctatttatgtattagttgaaaaccctatttgtgctggcgggttaactgcgattttattaaatattatcctccctggtggctaccgacaggaaaacgttctgcctggtattacctcagcggaagagatggattaacagtaaaggagtcaatgatgtcaggagaacacacgttaaaagcggtacgaggcagttttattgatgtcacccgtacgatcgataacccggaagagattgcctctgcgctgcggtttattgaggatggtttattactcattaaacagggaaaagtggaatggtttggcgaatgggaaaacggaaagcatcaaattcctgacaccattcgcgtgcgcgactatcgcggcaaactgatagtaccgggctttgtcgatacacatatccattatccgcaaagtgaaatggtgggggcctatggtgagcaattgctggagtggttgaataaacacaccttccctactgaacgtcgttatgaggatttagagtacgcccgcgaaatgtcggcgttcttcatcaagcagcttttacgtaacggaaccaccacggcgctggtgtttggcactgttcatccgcaatctgttgatgcgctgtttgaagccgccagtcatatcaatatgcgtatgattgccggtaaggtgatgatggaccgcaacgcaccggattatctgctcgacactgccgaaagcagctatcaccaaagcaaagaactgatcgaacgctggcacaaaaatggtcgtctgctatatgcgattacgccacgcttcgccccgacctcatctcctgaacagatggcgatggcgcaacgcctgaaagaagaatatccggatacgtgggtacatacccatctctgtgaaaacaaagatgaaattgcctgggtgaaatcgctttatcctgaccatgatggttatctggatgtttaccatcagtacggcctgaccggtaaaaactgtgtctttgctcactgcgtccatctcgaagaaaaagagtgggatcgtctcagcgaaaccaaatccagcattgctttctgtccgacctccaacctttacctcggcagcggcttattcaacttgaaaaaagcatggcagaagaaagttaaagtgggcatgggaacggatatcggtgccggaaccactttcaacatgctgcaaacgctgaacgaagcctacaaagtattgcaattacaaggctatcgcctctcggcatatgaagcgttttacctggccacgctcggcggagcgaaatctctgggccttgacgatttgattggcaactttttacctggcaaagaggctgatttcgtggtgatggaacccaccgccactccgctacagcagctgcgctatgacaactctgtttctttagtcgacaaattgttcgtgatgatgacgttgggcgatgaccgttcgatctaccgcacctacgttgatggtcgtctggtgtacgaacgcaactaataataaaactttaacatcctcgtgaggacatcattatgtctggagacatcctacaaacaccggacgcaccaaagccacagggcgcgctggataattattttaaaattaccgctcgtggcagtaccgttcgtcaggaagtactggctggcttaacgacctttctggccatggtttattccgttatcgtcgttccgggaatgctgggcaaagcaggttttcctcccgcagctgtgtttgttgccacctgtctggtcgcgggcttcggctcgttgctgatgggattatgggctaatttgccaatggcgattggttgcgcgatttccttgacggcgtttaccgcattcagtctggtactcgggcaacaaattagcgttcctgtcgcactgggcgcggtatttctgatgggcgtcatcttcaccgccatttccgtaaccggtgtgcgtacctggatcttacgtaatttgccgatgggtatcgctcacggtacaggtatcggtatcgggctgtttctgctgctgattgctgctaacggtgtgggtatggttatcaaaaacccgattgaaggcttgccagtggcgctcggtgcgtttacctccttcccggtgatgatgagcttgctggggctggcggtcatcttcggcctggagaagtgtcgcgtacccggcgggatcttgttggtgattattgcaatttcgatcatcggcttaatctttgacccagcggtgaaataccacggtctggtggcgatgccaagcctgactggcgaagatggtaagtctctgattttcagcctcgatattatgggtgcactccagccaactgtacttccgagtgtactggcattggtgatgaccgcagtgttcgacgctactggcaccatccgtgccgtcgccggtcaggcgaatttgttggataaagacaaccagatcatcaacggcggcaaagccctgaccagtgactcagtaagttcaatattctccggcctggtgggcgcagcgcccgcagcggtttatatcgaatcagcggcaggaaccgccgccgggggtaaaacaggtttaaccgcaaccgtagtgggggcgttattcctgttaattctgtttttatcaccgctgtcatttttgatccctggttacgccactgcacccgctctgatgtacgtaggtttgctgatgttaagtaacgtctcgaagctggatttcaatgattttattgacgctatggctggcctggtgtgtgccgtgttcatcgttctgacttgtaatatcgttaccggtattatgctgggctttgtgacactggtcgtaggccgcgtctttgcacgcgaatggcaaaagctgaatattggtacggtgatcattactgccgcactggtcgcattttacgcgggtggttgggcaatctaatagattctccgcgcctttcagcgcggagatttctttcagagaggattctcaccgctggcaacaatacgctgctggcggactcgcctgagttctctttcagtaagcaactgcagcgcctgtgttgggcaagattcaacgcaggctggcccctcttcccgctgttcacagagatcgcatttcacaatttgttgtcgggtatcccccggcaacgactgaatggtgatcattccaaacgggcacgcactgacgcaactctgacagccaatacaacgggcagaattggtctgcaccacctgctcgcccatcgtcagcgcccccacggggcaagcgccaacacaaggggcgttttcacactgatggcacatcaccggcgcactgatgctgtccagtcgctgtaccttcagccggggtaaaaagacatcggcattcaactcctgttctgaagggtgagcgaccacacaggctacttcacaagtacggcagccaatacagtcagccggattaacgataattaacgatttcatcacgatgccttcgtatcaaacagagttaacatatcgcgcgccgcctgccttcctgcggccattgcagtgacaaccagatccgcgccatgaactgcatcaccaccagcaaagacttttttcagatgcgtctgggtaggtaaatacccgacgtcaccggtttgaatcaggccccatttatcgagtttaattccgctgccctgcaaccacggcatggcatgcgcctggaaaccaaaggccataatcagaacatcggcgggcaattcaaactctgaacccgctaccggacgaggacgacggcgaccatccggccccggctcacccatggcggtacgaatcaggcccaccgcagttaaacgcccatcttcgtcacaagcgatatattgcggttgaacattgaactgaaactcgacaccttcctcgcgcgcattaaccacctctttgcgcgagcccggcatactgacttcatcacgacgatacgcgcaggtcacgctggcggcattgaggcggatggaagtccgcaaacaatccattgtcgtatcgccaccgcccaataccacgactcgcttaccttccacgtccgtcagcggatactcttcagactccggcaatcccatgagctggcgggtatgggcagtcaggaacggtagagcctgaatgacaccgggcgcatcttcatgcggcagatctgctcgcatcatcccgtaagtccccacgccgatgaaaactgcatcatattcagaagttaaatcgctaaaggtaatatcgcggccaatttcacagttaagatgaaagtcgattcccattgcggtgaatatctctcgccgctggcttaataccgttttatcgagtttgaaaggaggaatgccaaaagtcagcataccgccaatttctggatggcgatcaaagacatcgacctgaactcctgcgcgcgccagaatatcagcacaccctaaccctgcaggcccagcgccaatcaccgccactttttcgctacggggaacaactttgctgacatcgggacgccagcccatcgccagcgcggtatcggtgatgtagcgttccagattaccgatagagactgcgcccgagtgatctttcaaagtacatgcgccttcacaaagacggtcctgtggacataccctgccgcaaatttctggtaaggaactggtctggtggcaaagttctgccgcttcaataatctttccttcctgtaccagacggatgtaatccggaatagcgttatgcagcgggcaatgccagttgcagttagctttttcggcacaataaacacagcggtcactctcataagtcgcttgttgtggatccagcccgcaatatatttcgccaaagtgggttttccgttcactcgctgaaattttatctgcgcctttacgcgagttaacggggagcaacgctgcactgcgagatggctgagcgtctgatgacgcttttcctgctgccgttttgcgctggcgggccacctttatctgctgcaaccctttatcgtccatcagtcgtaacgcctgtgttgggcaaacttcaatacaggcttgcgtgccggaactgcgctggttacaaaggtcgcatttctgcgcaatcgtatcgaccatctcaacgacgccaaaggggcaagcgattgcgcatcttttacaaccaatacatttttgctcgtccagttgtacgctatcggactggaaagtcagagcattaaccggacaagccgtaacgcaaggggcattgttgcagtgatggcaggccaccggattcgcagcctggcctttccctacaacgtggatacgcggtcgaaagtcactgtgactcagcggccagttttcttgattgtgtgccaccgcacaggcaatttcacaagcatgacagcctatacattccgcagcttcagcagcaataaacttattcatttgcatccctttcatttaatgagttatgtcttctcaaatttcgcgatgcaataaacgggcatatattaggtagcatgaccgttttaattataattttgcgactgagttcaaattattgcccctcaatctatgccgctttcattatttcaacattgccgatcaaaagagcgctatccagataaaaacgattaaatgcgagagtgcgacatgccagaatgattaatgaaatatcaatatgagaaaattacagataattccattgtcaggttctcttctcattttcgtggtttaaccacgattatgtgattgcctccgcaattcctgtctctaactccccttcctcgcaaaaactggcactccacgagcatgtgtttagacagtttcattaacgtaaacggttgctttttactctggcgggcgaaaggagaaacactgatgagcgccatagattcccaacttccctcatcttctgggcaagaccgcccaactgatgaggttgaccgcatattatcaccaggaaagctgatcatactcggtctgcaacacgtccttgtcatgtacgcaggtgcagtcgctgttcctcttatgattggtgaccgactgggcctctcaaaagaagctattgcgatgctcattagctcggatctcttttgctgcgggatcgtcacattattgcaatgtatcggtatcggccgctttatggggatccgcctgccggtgattatgtcggtgacctttgctgctgtaacaccaatgatagccattgggatgaacccggatatcggcctgctggggatatttggtgccactatcgccgcgggttttatcaccacattattagcgccacttatcggtcgcttgatgcctttattcccgccactggttaccggtgtggttattacttctatcgggcttagcatcattcaggtgggtattgactgggccgccggaggtaaagggaatccgcaatatggtaatcccgtttatttaggtatctcctttgccgtcttaatttttatcttgctcattactcgctatgcgaaaggatttatgtccaacgtcgccgtattactggggattgtatttggctttttactttcgtggatgatgaatgaagtcaatttatccgggctacatgatgcttcatggtttgcgattgttacgccgatgtcgtttggtatgccgattttcgatcccgtttccattctgaccatgactgccgtgttaatcatcgtgtttatcgagtcaatggggatgttcctggcactgggtgaaatagtcggtcgtaaactctcttcgcacgatattattcgcgggctgcgtgtcgatggcgtagggacaatgataggcggcacgtttaacagcttcccccacacgtcattttctcaaaacgttggcctggttagcgtgacgcgcgttcatagccgctgggtgtgtatttcttcgggaattatattaatcctgtttggcatggtgccaaaaatggcggtgctggtagcctccattccgcaatttgtgctgggcggcgctggtctagtgatgttcggcatggtactggcgacagggattcgaattctgtcgcgctgtaactacaccaccaaccgttacaacctctatattgtggcgatcagtctcggcgttggcatgactccgacgctctctcacgatttcttttctaagttaccggccgtactgcaaccgctgctacatagcggcattatgctcgcaacccttagcgccgttgtgctgaacgtcttctttaatggctatcagcatcatgctgacctggtgaaggaatccgtctctgataaagatttaaaagtcaggacagtacgtatgtggcttctgatgcgcaagctgaagaaaaatgagcatggagaataatatgaattttttaatgcgcgctatattcagtctgttgttgctttttactctctctattcctgtcatttctgactgtgttgcaatggccattgaaagtcgcttcaaatatatgatgctacttttttaaatggtttttacctgtcggcatccgctcaaaacgggcggttgtcgataaacgctcacttggttaatcatttcactcttcaattatctataatgatgagtgatcagaattacatgtgagaaattatgcaaacggaacacgtcattttattgaatgcacagggagttcccacgggtacgctggaaaagtatgccgcacacacggcagacacccgcttacatctcgcgttctccagttggctgtttaatgccaaaggacaattattagttacccgccgcgcactgagcaaaaaagcatggcctggcgtgtggactaactcggtttgtgggcacccacaactgggagaaagcaacgaagacgcagtgatccgccgttgccgttatgagcttggcgtggaaattacgcctcctgaatctatctatcctgactttcgctaccgcgccaccgatccgagtggcattgtggaaaatgaagtgtgtccggtatttgccgcacgcaccactagtgcgttacagatcaatgatgatgaagtgatggattatcaatggtgtgatttagcagatgtattacacggtattgatgccacgccgtgggcgttcagtccgtggatggtgatgcaggcgacaaatcgcgaagccagaaaacgattatctgcatttacccagcttaaataaaaaaaccccgacatttgccggggttgtgagcataacgtaatgcttattttaccggacgcatcgccgggaacagaataacgtcgcggatggtatggctgttggtgaacagcattaccatacggtcgataccaattcccagacctgctgtcggcggtaagccatgttccagtgcggtgacgtaatcttcatcgtagaacatcgcttcgtcgtcacctgcgtctttcgcggcaacctgatccaggaagcgttgcgcctgatcttccgcgtcattcagctcgctaaagccgttaccgatttcacgaccaccaatgaagaactcaaagcggtctgtgatttccgggttaacgtcgttacgacgcgccagcggagaaacttctgccggatattcagtaatgaaggtcggctgaatcagatgtgcttctgccacttcttcgaagatctcggtaacgatacggcccagaccccagctcttctcaacgtggatgccgatagattcagcaattgctttcgcagagtcgaagttgtccagatccgccatgtcggtttccgggcgatatttcttgatcgcttcacgcatggtcagtttttcgaacggtttaccgaagtccagcgtcacgtcgccgtaggtcacttccgtcttaccgagaatatcctgtgccagagtacggaacagcgattcggtcagctcgatcagatctttgtaatctgcgtaagccatgtagagttccatcatggtgaactctgggttatgacgtacggaaataccttcgttacggaagttacggttgatttcgaatacacgctcgaagccaccaaccaccagacgcttgaggtacagttccggcgcgatacgcaggtacatgtcgagatccagcgcgttatggtgggtgataaacggacgcgcagcggcaccgccagggatcacctgcatcatcggcgtttcaacttccataaagccgcggttcaccatgaactggcgaataccagagaggatctgcgagcgcactttaaaggtgttgcgggattcatcgttggagatgagatcgagataacgctgacgatagcgcgcttcctgatcctgcaagccgtggaatttatccggcagcggacgcagtgctttggtcagcagacgcaactcggtgcagtggatagacagttcgccggttttggttttgaacagcttacctttcgcgccgaggatgtcgccgaggtcccattttttgaactgctcgttataaacgccttccgggagatcgtcacgggcaacgtacagctgaatgcgaccgccaacgtcctgcagggtaacgaaagacgctttacccataatacgacgggtcatcatgcggccagcaacggcgacttcgatgttcagcgcttccagttcttcgttctctttgccgtcgaattctgcgtgcaattggtcagaggtatgatcgcgacggaaatcgttcgggaaggcaatcccctgctcgcgcaggttcgccagcttctcacgacgcgttttcagttcattgttaagatcgactaccgcgtcagcgccctgtgcgtgttgttcagacatgttggttcctcataaccctgctttcaaacttgcttcgataaattgatccaggctgccgtccagcacggcctgcgtgttgcgggtttctaccccggtgcgcagatctttaatgcgggagtcatcaaggacataagaacgaatctggctgccccagccgatgtcggatttgttatcttccatcgcctgtttctcggcatttttcttctgcatctccagttcataaagcttcgctttcatctgcttcatggcctgatctttgttcttgtgctgggaacggtcgttctggcactgggtcacgatcccggtcgggatgtgggtaatacgcaccgcagattcggtacggttaacgtgctgaccgcccgcgccggacgtgcgataaacgtcaatgcgcagatccgccgggttgatttcgatatcaatatcatcatcaacttccggataaacaaacgcggagctgaacgacgtgtggcgacgaccgccggagtcaaacgggcttttacgcaccaggcggtgaacgccggtttctgtacgcagccagccgtaagcgtaatcgccggagattttgatcgtcacggatttaatacccgccacttcaccttccgactcttcgatgatttcagttttgaaaccacgcgattctgcccagcgcagatacatacgctcaagcatgctcgcccagtcctgtgcttccgtaccgccagaccccgcctgaatatcgaggtagcagtcggcgctgtcatattcgccagagaacatacggcggaactcaagctgcgccagtttttcttccagggcgtcgagttcagcaacggcttcgttaaaggtttcttcgtcgtcagcttctacagccagttccagcagaccagaaacatcttccagcccctgtttcatttggtcgagggtgtcgacaacggcttcgagggaggaacgctctttacccagcgcctgtgcgcgttcgggttcgttccagacatccggctgttccagctcggcgtttacttcttccagacgctctttcttggcgtcgtagtcaaagataccccctaagaacgtcggagcgttccgtgaggtcctgaatgcgattatttaccggattaatttcaaacatggtctgatttcttttattgagctagtcaaaatgcggtgataagagcgggattgtacccaatccacgctcttttttatagagaagatgacgctaaattggccagatattgtcgatgataatttgcaggctgcggttgccgcgaaactcgttgatatcgagcttataagccagttgcacttcgcgcacgccgttatccggccagagggcggtatcgacattaaaagcaataccatccagcagtggaccgccgccgaccggttcgaccatcaccttcaaatgacgttcgcccaccagccgctgttgcagcagacggaaatgaccgtcaaacagcggctccgggaacatctgcccccacgggccagcatcgcgcagcagctgcgccacttccatggtcatttcggccgggcttaacggaccgtctgataccacttcgccttgcaatagcgaagggtccagccactcagtaaccagttcgccaaaccgttgttgaaagagtttgaatttatcctcttccagcgacaaacccgccgccatcgcatgaccgccaaacttcagcatcatgccagggtagagtgtgtctaatcgctccagcgcatcacgcatatgcagcccctgaatggagcgaccggaacctttcagcgtaccgtcacctgctggcgcaaacgcgataaccggacggtgaaaacgctctttgatgcgcgaagccagaataccgacaacgccctgatgccattcggggtgatacattgccagcccgccgggtagcgtgtcacggctgcgctccagtttctcgcacagggtcagggcttcaatttgcattccttgttcgatctcttttcgcgtctggtttagcgcatcgagttcatttgccagcacgcgcgcttcgccgatgttgtcgcacaacaacagcgccacaccgacggacatatcgtccagtcgtccggcagcattgagacgtggccccagcgcaaaacctaaatcgctggcggcgagtttttgtgcatcacggtttgccacttcaagcagcgctttaatccccggacggcactttccggctcggatgcgactcatcccctgccaggtcagaatgcgattattagcgtccagcggcacgacgtccgccactgtccccagcgcgaccagatccagcagttctgccaggttaggaattgcgatgttacgctcatcaaaccagccctgatcgcgcaaaaaggtgcgcagcgccagcatcagataaaacgccacacccacgcctgccagtgatttcgacgggaaattacagtcgcgcaagttagggttaatgatcgcttccgctgcgggtaatgtgtcgcctggcaaatggtgatcggtaacaataaccgggatgcccaacgagcgagcgtgctcaacccccgcatgggaggaaataccgttatccaccgtgacaattaactgcgcgccacgggcatgggcctgatcgaccacttccgggcttaagccgtaaccgtcttcgaaacggtttggtaccaggtagtcgatattgctgcaaccaagcgagcgcatcgccagcacgcttagagccgtgctggtcgcgccgtcggcgtcgaaatcaccgaccacaataatccgcgttccttcgcgaaaagcgttgtaaaggatctcaacggccttttcgacgccgctcagttgctgccagggcagcatacctttaacactgcgttccagttcttgcgcactgcgtactccccggctggcgtataaacggcgcagcaagggaggcaattcagcgggcaagtctgccgtttcatcgacttcacggcgacgaagttgtatctgttgtttcacgcgaattatttaccgctggtcattttttggtgttcgtcgaggaattctttcatctctttcggcggctggtaacccggaacaagtgtgccattgctcagcacaactgccggagtaccgctaacgccaagctggacgccaagtgcgtaatggtcggcaatatccacgtcgcaactggctggtgcgacgcttttacctgccatcacatcatcaaacgctttgtttttatctttcgcacaccagatagctttcatttctttctctgcatcgctgtccagcccctggcgcgggaaagcaagataacgcacggtgatccccagcgcgttgtagtctgccatttgctcatgcagtttgtggcagtaaccacaggtaatatcagtaaacacggtgatgacgtgtttttcctgcggcgctttataaacgatcatctctttttcaagcgcattcaactgctttaacagcatcttattggtgacattgaccggagccgtgccactaacgtcatacattggcccctgaatgatatgtttaccatcatcggtgatgtacaacacgccgctgttagtcagaactgtcttcatgccagctacaggcgcgggctgaatatcgctgcttttgatgcccattttggctaacgtttgttgaattgccgcgtcatcagcctgagcaaagcctgaaaacgccgctaacaaagtaaacaacataaaacctttcttcataaatcttcccgttcttttcagacatcacgcccgcgggtgatgctgttgatgaagttgccgcagacgctcggtagcgacatgcgtataaatttgcgtggtggagagatcgctgtggcccagtagcatctgcaccacgcgtaaatccgcaccatgatttaataaatgagtggcaaaagcgtgacgcaacacatgcggtgacagcttttcgctgtcgatacccgccagcacagcataatgtttaatacggtgccagaaggtctgtcgcgtcatctgctgcgcacgctggctgggaaacaacacgtcaattgacacaccattcagcagccacggacgcccatgttccagataggtttccagccagtaaaccgcctcttcacctaacggcaccagacgctctttgttgcctttaccaatgacccgtaccacgccctgacgcaggctgatatcactcattgtcagtccgaccagttcagagacacgcagcccggtagcatacaacacttcaagcatggctttatcgcgtagctccagtggctgatcgattaatggtgcctgtaataaacgttcgacctgcgcttcgcttaaatcttttggcaaacgctggggcaatttcggtgaagcgagatgcgcactgggatcgtcttcacgaaacttttcgcgataaagatactggaacaatcggcgcactgcactcagcaaacgcgctgagctggtggctttatacccgccctccagccgttctgccagtaatgcctgcaaatcgtcactttgcgccgtcgccagcgtcaacccgcggtgatgcaaccactccaccatcattgacagatcgcgacggtaagcgttcaacgtattttcagccagatttttttccagccacagagcatcaagaaactgctcgatgcgtgccagatcctgtttcacttgcgccccttatggtcactcatttgatccattatgccttattgtgccgtgactaaagcgattctgatacactagccgcaaaagccacagcagaatcgagaagcttacgttatgaatatgggtcttttttacggttccagcacctgttacaccgaaatggcggcagaaaaaatccgcgatattatcggcccagaactggtgaccttacataacctcaaggacgactccccgaaattaatggagcagtacgatgtgctcattctgggtatcccgacctgggattttggtgaaatccaggaagactgggaagccgtctgggatcagctcgacgacctgaaccttgaaggtaaaattgttgcgctgtatgggcttggcgatcaactgggatacggcgagtggttcctcgatgcgctcggtatgctgcatgacaaactctcgaccaaaggcgtgaagttcgtcggctactggccaacggaaggatatgaatttaccagcccgaaaccggtgattgctgacgggcaactgttcgtgggtctggcgctggatgaaactaaccagtatgaccttagcgacgagcgtattcagagctggtgcgagcaaatcctcaacgaaatggcagagcattacgcctgatctcactgacggcttagcgcatatgctttgccgtcatctttatctttgcgtctcttgttgcaacaaaatccgccgtaaatcccgccattcagcttcgtccatgctgtcggctgccagccataaatgttgccgtttaccgccatcagaacgtaaacgcagcatcatgccgctcttaatcatccacggtgctttgacgatgctccactcctgcccttgccaacgcaaacgcccgtccatcaacaagcgaatttccccctggcgagcattaatacgccgctggctgcgaacgcaatcaaacaccaccagcgaaagtaacaccatccataacggggtgtaactgagtggccagggcatgagtaaaataacagcggcaaccagcccatgaatcagcaaggaaagccactgtgcgcgccaggagacgcgcaaatcagattgccacaggaccacgttcccggttccgtgtctggatgagtcggaccatcatttccagttctgcatcggccggtttaccgtgattcatcagccagttaaacaggtccggatcgtcacattccagcagacgaataaagatgcgtttttcgtcatcgcttaagctgtcgtactcatgttcgaaaaacggcatgattgaaatatcgagttcgcgcataccacggcggcatgcccaatgaatgcgggctttgttgttaatgtccatcttcttcctgtctcacgaaaatccagtacccggctattgtaacgtgtttttcgccttcttttacgggaatatcagtaaacaccatcgcgatcgcgaaattaattcacaacaattcaatggcttcatttttttggaagtcgcctcgcagaaggcacagatcgcgtagtgaaagcacttgcattgcctcatagctcttttaccattagtcattaatacgccgttaagcaactcaggactctattatggcttttacaccttttcctccccgtcagcctacggcttctgcccgtttaccgctgacgctgatgacgcttgatgactgggcgcttgccaccattactggcgcggacagcgaaaaatatatgcagggtcaggtgacagcagatgtcagccagatggcagaagatcagcacctgctcgccgcccattgcgacgccaaaggtaaaatgtggagcaatttacgtctgttccgcgacggcgatggctttgcatggattgaacggcgcagcgtgcgtgaaccgcagctgactgaactgaaaaaatatgcggtattctctaaagtgaccatcgcgccagacgacgagcgtgtgctgcttggtgttgccggttttcaggcgcgcgccgcgctggcaaatctctttagcgaactgccttcgaaagaaaaacaggtagtcaaagaaggcgcgaccactttgctatggtttgaacacccggcagaacgtttcctgatcgtaaccgatgaagctactgctaatatgctgaccgataaactgcgcggtgaagcggaactgaacaatagccaacagtggctggcattaaacattgaagcgggtttcccggtgattgatgccgccaacagcgggcagtttatcccacaggcgaccaatctccaggcgctgggcggtatcagctttaagaaaggctgttataccggacaagagatggtggcgcgagcaaaattccgtggtgccaataaacgtgcgctctggttgctggcaggtagcgccagccgactgccggaagctggtgaagacttagagctgaaaatgggcgagaactggcgtcgtaccggtacggtactggctgcggtaaaactggaagatggtcaggtcgtggtacaggtcgtcatgaataacgatatggaaccggatagcatcttccgcgtacgcgacgatgcgaatacattgcatatcgagccgctgccgtattcgctcgaagagtaaatctctttatcgcatcaggcatttatcgcctgatgcgacgctggcgcgtcttatcatgtctgggatttgatgcctttatcacaacagggacgaggcccgtagatcggataaggcgttcacgccgaatccggcagttgtgctccgatgcctgatgcgacgctggcgcgtcttatcaggcctacaaaggcatacccattacgcctgcccaatatacaaatagatcgccagaaagtggcacacactaccgccgagcacgaagccgtgccagatggcatggttgtatggaatgcgtttgcagacgtagaaaatcaccccgagcgaataaaccacgccgcctaccgccagtaaggtaacgctgcccgccgcgagcttaactgccatttcataaattaccaccagcgacagccagcccatcgccagataggtcaccagagataaaattttgaatcggtgcgcgatggtcagtttaaacagaatacccagcaatgccaggctccagataacaatcatcaacccgcgcgctaacggagaatccagccccaccagcaaaaacggcgtgtaggttccggcaatcaacaggtaaatagcgcaatggtcaaatttcttcagccacatttttgcccgttgatgaggaatggcgtgatagagcgtcgaagcgaggaacagcaggatcatactgccgccatagaggctgtagctggttatcgctgtggcgctggcattaagatccaccgcctgaaccagtagcaacaccagcccaacgataccaaacaccaacccaatgccgtgactgacgctgttggctatttcctctgccagtgaatatccctgcttaatgaggggcttctgaaccataacttactccggagaaacgtacacgcacatgtatacctctccagcgtaactgagaatagttccagtgaacacctgttagctaaaataaattctgatttgagactaatctcctaaaaatcatgaaattaaatgcgaaatttcaactaacaggcgtgagttcaatttaaagacatttaaattcaatcacataaaattgtgtctgaccgggatagatgtcagcaatgacttttttcagttcagtcagggtcatattttcctgctctgcatgtttttcagtcagcgtatccagcgttacggttgaggttgcggtgacttcaatcgtgcaaaaataaccgtcatcttcaaaacgtccgacacgaagcacatcacccgttttgaagtgcgattcagactcgtcgcggatggtgatggttttacgcccagccagaatgtcatcctggaaacgttgaaaaaaagtgatgtcgtttggctgcatggtactatttcctgtaagaattgactcatctggagcctatgatagtgaaaaaactcaccttaccgaaagatttcttatggggcggcgcagttgccgctcatcaggtcgaaggcggctggaacaaaggcggaaaagggccgagcatttgtgacgttctgaccggtggcgcacacggcgtgccgcgcgaaatcaccaaagaagtcttgccaggaaaatactatccaaaccatgaagccgttgatttttatggtcactataaggaagacatcaagctatttgccgaaatgggcttcaaatgttttcgtacatccattgcctggacgcgcatttttccaaaaggcgatgaagctcagccaaacgaagaagggctgaagttctacgatgatatgttcgatgaactgctgaaatacaacatcgaaccggtgatcaccctctcccactttgaaatgccgctgcatctggtgcagcaatacggtagctggaccaaccgtaaagtggttgatttctttgtacgtttcgcggaagtggtatttgaacgctataagcacaaagtcaaatactggatgaccttcaacgaaattaacaaccagcgtaactggcgtgcaccgctgttcggttactgctgctccggcgtggtgtataccgagcatgaaaacccggaagagacgatgtatcaggtgctgcatcaccagtttgtcgccagcgccctggcggtgaaagctgcgcgtcgcattaacccggagatgaaagtcggctgtatgctggcgatggtgccgctctatccttactcctgtaacccggacgatgtgatgttcgctcaggagtcgatgcgcgaacgctacgtctttaccgatgtgcagctacgcggctattacccgtcctatgtgttgaacgagtgggagcgtcgcggatttaacatcaaaatggaagacggcgatctggatgtgctgcgtgaaggcacctgcgattatcttggtttcagctattacatgaccaatgcagtgaaggccgaaggcggcaccggcgatgcgatctctggttttgaaggcagcgtaccaaacccgtatgttaaagcatctgactggggctggcagattgatccagtaggtctgcgctatgcactttgcgaactgtatgagcgttatcagaggccgctgtttattgtcgaaaacggttttggcgcttacgacaaagtggaagaagatggcagcatcaacgacgactaccgcattgactacctgcgcgcccatatcgaagagatgaaaaaagcggtgacttacgatggcgtggatctgatgggctacacaccgtggggctgcatcgactgcgtgtcgttcaccaccgggcagtacagcaaacgctacggctttatctatgtgaataaacatgacgacggtactggcgatatgtcgcgttcacgtaagaagagctttaactggtacaaagaggtgattgccagcaacggcgagaagctttaagtcgatgaagtaccggatgcaatacttgttgcatccggtcagacaacttccctgttttatttcccgcccgccaaatcgataaaacttcccgtgacgtaagaggctttatcacttagtagccagacaatggcctgcgcgacctcttctgcctgtccaccacgctgcatggggatgttcgacttaacgcgatcgacgcgtccaggctcgccgccgctggcgtgcatttcggtataaataaaccctggccgcacgcagttaacgcggatcccctgcgcggcgacttccagcgatagtccggtggttaacgtatcaatcgcccctttcgatgccgcgtaatcaacatattcccctggcgaacccaaccgtgaggccaccgaagagacattgacgatagcgccgccactgccaccatttttaagcgccatgcgttttaccgcctcgcggcagcagagaaaatatcccgtcacgttggtggaaagtactcggttgattcgctctgcggtaaggttttcaacggtgcactgggtaaacaagatcccggcgttattgaccagcgctgctagcggttcatcgtgctgatcgattgctgtaaacatcgcaacgacctggttttcgtcgctgatatccgcctggagcacgaatgctttgccaccggcttgcgttattaagttcatcacttcctgcgccgcgtggaggttttgctgataattaaccgccaccgtatacccttcttgcgccaacagtaatgcagttgcccgcccgatgccgcgactgccaccagtcacaagtgctatagccatttgtttttccgagaaaaattaattcgttgacgtatctttgagattgctaacaaactggctcaatcttcaatgttggcacgcttttccccctcgccctttcagggagagggccggggtgagggtaaatattcgcgccagtgccggcctgttcccctcaccctaaccctctccccaaaggggcgaggggactgtctgagcacttttgtactttgtcatctgactaaaaaggcgccgaagcgcctttagaaaatagtcgaatcagtgaattactggtattcgctaatcggtacgcaggagcagaacaggttacggtcgccgtaaacatcatccagacgtttcactgtcggccagtatttgtctgccacacctgccgggaataccgcaacttcacggctgtacggatgcgcccactcggcgaccagttcgctctgaatgtgcggcgcgttcaccagcgggttatcttccagcggccagacaccggctttcacctggtcaatttctgcgcggatagccagcatcgcgtcgataaagcgatccagttccactttgctttcagattcagtcggttcaaccatcagcgtacccgccaccgggaacgacatcgtcggcgcgtggaaaccgtagtcgatcaggcgcttggcaatatccagctcgctgatgccggtttcttctttcagcgggcgaatatcgagaatacattcgtgcgccacgcgaccgtcgcgaccggtatacagcaccgggaaggcatcctgcaggcggctggcaatatagttggcgttgaggattgccacctggcttgcttttttcagcccttctgcgcccatcatgcggatgtacatccagctgattggcaggatagaggcgctaccgaacggtgccgcagaaaccgcgccctgacgggttaacatgccttcgatttgcaccacgctatgacccggtacaaacggtgccaaatgcgctttcacgccgatcggtcccatacccggaccaccaccgccgtgcggaatgcagaaagttttatgtaggttaaggtgtgaaacgtccgcaccaataaagcccggcgaggtgatgccaacctgggcgttcatgttcgcgccatcaaggtaaacctgaccgccgaactgatgcacgacttcacacacttcacggatcgtttcttcatacacgccgtgggtagaaggataagtcaccatgatacaggagaggttatcgcccgcctgttccgctttcgcgcgcagatcagtcagatcgatgttgccgtttttatcacacgccacaaccaccacctgcattcctgccatatgtgcagaagcggggttagttccgtgcgcagaagccgggatcaggcagatatcgcgatgcccttcgttgcggctttcatgataatgacgaatcgccagcaggcccgcgtattcgccctgtgcgccagagttcggctgcatacaaacggcgtcgtaaccggtcagtttcaccagccagtcagccagctgcgcaatcatctgctgataaccttcggcctgctccggcgggcagaacgggtgcagttcggcaaattccggccaggtgattgggatcatctcggcggcggcgttcagtttcatggtgcaggaacccagcgggatcatcgcctgattcagcgccagatctttacgctccagcgagtgcatatagcgcatcatttcggtttcgctgtggtagcgattaaacaccggatgggtgaggatttcgtcgtcgcgcagcatcgcaggctggatagagcggctgtcgtgagccacgtctttgtccagcgtgtcgatgtccaggccgtggttatcgcccagcagcacgttgaaaagctgcattacgttttcacgcgtggttgtttcatcaagggtgatcccaaccgcgttcagaatatcgctacgcaggttgatttcagccgcttcggcacgcgtcagtacgcccgctttgtcggccacttccacacacaaggtgtcgaaatagtgcgcatggcgcagtttcagacctttttgttgcaggcccgccgccaggatatcggtcagacggtgaatgcggttagcgatacgtttcaggccaaccgggccgtgataaacggcatacaggctggcgatgtttgccagcagtacctgggaagtacaaatgttggagttcgctttctcacggcggatatgttgctcgcgagtctgcatcgccatgcgcagcgcggtattgccagctgcatctttcgatacaccgataatacggcccggcattgagcgtttgtattcatctttcgccgcaaagaatgccgcgtgtgggccaccgtagcccatcggcacgccgaagcgttgcgccgaaccaaaaacaatatccgcgccctgtttacccggcgcagttaacagcaccagcgccataatatcggcggcaacgctgaccacaattttgcgtgatttcagttcgctaataagcgcagtgtagtcgtgaatttcaccggtagtgcctacctgctgtaacagcacgccgaagacgtcctgatggtcgagcactttttgcgcgtcatcgacaatcacttcaaaaccaaaggtttcggcacgagtacggaccacatccagcgtttgcggatgcacatcggaagccacgaagaagcggttggcatttttcagtttgctgacgcgtttcgccatcgccattgcttcggcggcagcggtggcctcgtccagaagagaagcagaggccatatccagtccagtcaaatccagcgttacctgctggaagttgagcagtgcttcaaggcggccctgggagacttcaggttgatacggagtgtacgcggtataccagcccggattttccagcatgttacgcaggataaccggcggtagctgcacggcggtgtaacccatgccgatgtaagacgtgaagcgtttattgcgactggcaatagccttgagttctgccagtgcggcgtattcggtcgccggtgcgccaacctgcggtggtgtcgcaagttgaatatctttcggcacaatctggccggtcagcgcgtttaacgattgtgcaccaacggcattcagcatttcttgctgttgcgcggcgtccggtccgatatggcgttcaataaaagcgccgctgttttcaagctggcttaacgtctgtgtcatgagcgatggttcctgaaacgtgcagtgaattgtgaacctctctccttacgaagagagtgagggtgaggcataaattttcctcaccctgatcctctcccgcagaagaggaataaagccgttactcgtcttctaacaatgcttcgtatgcggtcgcatccagcagtgattccagttcgctttcatcgctggctttgattttaaagatccagccgcctgcatacggttcgctgttcaccagttccggggaatcgctcagtgcgtcgtttaccgccacgatttcaccgcttactggcgcataaatgtctgacgccgcttttaccgattcggcaaccgcgcagtcatcgcccgcgctaaccgttgcgcccacttccggcaggtcaacaaacaccatatcgcctaacagctcctgagcatgttcggtaataccaacggtgtaagtgccgtcggcttctttacgcagccattcgtgttctttgctgtatttcagttctgctggtacgttgctcatcaatcaatctccaaaaaagtaaatcacgcgacggctttgccgttacgcacaaaaacaggttttgtcactttaaccggcatttcacggttgcgaatttgcacaatcgccgtttcgccaataccttccggcacgcgcgccagcgcaatgctgtaacccagcgtcggggagaaagtaccgctggtgataatgccttcatgctggttgccctgcgcatcggtaaagcgtaccggcagttcattacgcagcacgcctttttcggtcatcaccagaccaaccagtttttctgtaccatgctcacgctgcacttccagggcttcacgaccgataaagtcacgatctgccggttcccaggcgatggtccagcccatgttggcggctaaaggagagatggtttcgtccatctcctgaccataaagattcatgcccgcttccagacgcagcgtgtcacgcgcgcccaagccacatggcttaacacccgcttccaccagcgcacgccagaaatcggccgctttttcattgggcagcgcaatttcatagcccgcttcaccggtataaccagtggtggcaataaacagatcgcccgcctgcacgccaaagaacggtttcatcccttccaccgcctgacgctgggcgtcattaaacagtgtggcagcttttgcctgcgcattcggcccttgcacggcaatcatggaaaggtcatcacgaacggtaatttcgatgccgaaaggttcagcgtgttgggtaatccaggagaggtctttttcgcgggtggcggagttaacaacgaggcggaagaaatcttcagtaaagtagtagacgatgaggtcatctatcacaccgccagaggcattcaacatccccgagtaaagggctttgccgcttttggtgagcttcgccacatcgttcgccagcagataacgcagaaactcccgggtgcggctgccgcgaagatcgacgatggtcatatgtgacacatcaaacattccggcatcggtacgtaccgcatgatgttcgtcgatttgcgaaccgtaatgcagcggcatcatccagccgtggaaatccaccatgcgagcgccgcaaagcgtgtgttgttcgtacaaaggagtctgttgtgccatcttgtcctcattgaataagcggggctgacaactttttcatggtgaaattatcaccacgaaacccagcatcggagccactcccggtccccaacgcaatcgttctcttttgcctgaacttaccaccgaaacagactgttaaccataaggtaaaattgatcatcacattagcttatggttaaaaaatgcaaaaatcgcgacagaataaaaaaccaaaaaatacaccagtttctatacaaagatgatgtgatgagaaagtcaatttgaataagacaatattaagagctaaaaaaatgtcaaaaaacactaaatcaaaaaataatggcattagaaaatataatgcgaaaacggaggtgaaattagtttatttcaaatgaggaaaatctcccggcgaaaaaaccgggagatgaaagtgtgatgggtatcaaataaacaacagaggagaaatttttaacgcagccattcaggcaaatcgtttaatcccattgcctggcggataagttgcggcttaacgccaggaagcgtgtcggccagtttcaaaccaatatcacgcagcagttttttcgccggattggtaccggaaaacagatcgcggaatccctgcataccagccagcatcaacgccgcactgtgcttgcggctacgctcatagcgacgcagataaatgtactgcccgatgtctttcccctgacgatgcaaccgtttcagttcggcaatcagctctgcagcatccataaagccgagatttaccccctgccccgccagcgggtgaatggtatgtgcggcgtcgcccaccagcgccagacggtgcgaggcaaactggcgcgcataacgccccgtcagtgggaacacctgacgcgcgctctcaaccttgcataagcccaggcgattatcaaaagcgatatttaacgcgcgattaaattcgtcttcacttgcctgctgcatccgctgcgcttcctctggcgacagtgaccagacaatcgagcaaagatgcggatcgctaagcggtaaaaaggccagaatgccttcgccatggaaaacctgccgcgccaccgcatcatgcggttcttccgtgcgaatggtcgctaccagcgcgtgatgctgataatcccagaaagtcagcggaatatcggctttgttgcgcaaccaggaattagcgccgtccgcgccaatcaccagacgcgccgttaacatgctgccatctttcagcgtcaggaaggtttcattttctccccaggcgacctgctgtaattctgcgggggctaacagagtgatatctgacgactgatgcgctttgttccacagcgcgtagtgaatcactgaattttcaacgatatgcccaagatggctatagcccatgctttgatcgtcaaacgaaatgtgaccaaagctgtctttgtcccacacttccataccgtgataacagctggccctacgagagagaatgtcctgccagacgccaagacgggtgagtaatttttcgctggcggcattgatagccgaaacgcgcagttgtggtggtgcattcgccgccagaggttcctgtacgcgctgctccagtacggcaacgcgtaagccgctcccctgtaagccacaggcaaccgccagccccaccatgccgccgccaacaatggctacatcaacactttgcattgtttattccttaaaaccgccttcaacgcgccacccaaccgagggtgcgctgcgccagcacatcgcgtgccggggtgaataattccatcgtcatcagcccgatgttgcgcccgacaaccagcggtgcccaacggttggcaaaaagatgtacaaggctgtccgtgacgccaatggttgcttcgcgatcgctctgtcgacgctgctgataacggcacaatacgccgtaatcccccatgtcttctccgcgctcctgcgcctgagtcagggtttccgcaagactcatcacatctcgcataccgaggttaaacccttgcccggcaatcgggtgcagagtttgcgccgcattgcccaccagcacggtacgatgggtaatagatctggcggcgtgggttaacgccagcggataagcactgcgtttaccagcgtgggtaattttcccaagtcgccagccaaaggccgactggagttcacggcaaaacttctcgtcactccacgacaacacctcttcgcgccgttccagtggatgacaccagaccagcgaacagcgtccgtcagacatcggcaacatcgccagcgggccatgttgcgtaaagcgttcaaaagcgcgcccttcatgcgcaacggaagtagcaacgttggcaatcacggccagttgttcgtaaggctcctgctgccagtcaacgccgcacgcggtggctaacgctgaatgggtgccatcagctgctaccagcacgcggcccgtcagcgtctcgccactctccagcgtcacttcaacgtgactctgagtacgggcaacgttagccacgcgatcagggcaatgcagcgttacgccaggtgctttacgcagcaatgcaaacagccgttgcccgacattgtgcaattcgacaacctgtcccagcgccgccagttggtaatcttctgcggcgagggtgacaaatccagcgtgaccacgatcgctgacatgcacggtggtgatggcagttgcgcaatccgccagagattgccagacgccgatgcgcgccagttgctgacaggtacccgccgccagcgctatcgctcgtccatcaaagcccggatgagcatgtgactctggcgcagtcgcttcaatcaaatgtaccggcagcgccccgtgacttaaccgggaaatagccagcgccagcgtcgcgcccgccatgccgccaccgacgatgattacgctcattgctttctcgcagcaaccatcaacgcttcgatttcttccggctttttcaccacgctggcggtgaggttttcgttaccggtttcggtaatcacaatgtcgtcttcaatacgaatgccgataccgcgatattgttctggcacttctgcatccggcgcaatatacagccctggctctacggtcagtaccatgcccggttccagaatgcgcgagcgatcctgaccataaacacccacgtcatggacatccagtcctaaccagtggctaaggccatgcataaagaaaggacgatgggcgttctgagcgatcagttcatcaacatcacctttcaggatgccgagttttaccaggccgctaaccatgatgcgcaccacttcaccagtgacttccagaatggaagttcccggacgatacaggcgcaggctggtttcgagagactccagcacaatgtcgtagatttcacgctgggcctgggtgaatttgccgttgaccgggaaggtgcgggtaatatcgccagcgtaacctttgtattcacaacccgcgtcaatcaacaccaggtcgccgtcgcgcatttcacactcgttttcggtgtagtgcagaatgcagccgttttcaccgctgccgacaatggtgttataggacggatagcgcgcaccgtggcggttaaattcgtggtgaatttcgccttccagatggtactcgaacattcccggacggcatttttccatcgcccgtgtatgtgccatggcggtgatttctcccgcgcggcggagtacggcaatctcttctggcgatttgaacaggcgcatttcatgaacaacaggacgccagtcgatcatcgttgccggtgcggtgagattttgccgcgaacctttacgcagtttttccagcgcactgttcacgattacatcagcatatgcatattcgccctgggcatggtaaaccacatccaggccgttaagtagttgataaagttgctgattgatttcgctgaatgccagtgcgcggtcaacgcccagtttctctggcgcggcatcctggcctaagcgacggccaaaccagatctccgccgtcaggtcgcgaacgcggttaaacagaacgctgtggttatgagtgtcatcgcttttaatcagcaccagcaccgcttccggttcgttaaagccggtgaagtaccagaagtcactgttctgacgataggggtattcgctgtcggcgctacgtgttacttctggtgcagcaaaaatcagcgcggcgctgccgggttgcatttgctccaccagggcctgacggcgacgctgaaactcttgccgggatatctcactcataacactctccttacgttttttgtttttagtgtagagtcggtttttgtacttctggcgcggtcggttgcggatgagtaaaggtgtcgtggcataacagcgcggcaacacgaacgtattcgatgatctcttcaagcgacatttcaagctcttcctgatcttcgtcttcgtcgtaacccagttgcgcaatgttacgcagatcgtcgatagcttcaccggtttcgccggtcactttatccagcttcggttgcgtaacgccaagaccaagcaggaagtgattgacccaacctgccaatgcatcagcccgatcgaaaacgctgacatcatcgccatcaggcagataaagctgaaaaaggaagccgtcatcctgcagggcatcgctggtggcagagtgcattttacgcagtgcctgtgccagctcatgaccgaaagccatgccttcgttcgtcaggtcgtgaagtagcggtagccatgagctgtcatcgttaccgccacatatcatcccgctgattaaaccatgcatctcagctggggtcagacccgtcccttgttggttcagatactggttcatttcgttgtaaccaggcatttcgttctgtatagacataagcattcgtcgtcaaagggaggaatattcatgatatgctaccactttgggccctggtggaccagaaaagggcttgtctcttctcatcagggtagctatagtgtcgccccttcgcagaccatgggtctaaagacgaaggcagcgcagtcaatcagcaggaaggtggcatgtctgcacaacccgtcgatatccaaatttttggccgttcactgcgtgtgaactgcccgcctgaccaaagggatgcgttgaatcaggcagcggacgatctgaaccaacggttgcaagatctgaaagaacgcactagagtcacaaatactgaacagttggtcttcattgccgcattgaatatcagctatgagttagcgcaagaaaaagcaaagactcgtgactacgcggcaagtatggaacagcgtattcggatgctgcagcagaccatagaacaagcgttacttgaacaaggtcgcatcaccgaaaaaactaaccaaaactttgaatgacacttttcggtttactgtggtagagtaaccgtgaagacaaaatttctctgagatgttcgcaagcgggccagtcccctgagccgatatttcataccacaagaatgtggcgctccgcggttggtgagcatgctcggtccgtccgagaagccttaaaactgcgacgacacattcaccttgaaccaagggttcaagggttacagcctgcggcggcatctcggagattcccttcttatctggcaccagccatgacgcaactaccagaactcccactgacattatcccgacaagaaatccgcaaaatgattcggcaacgtcgtcgtgcgttaacgccggaacaacagcaggaaatgggtcaacaagccgctacccggatgatgacttatcccccggtggtgatggcacatacggtcgctgtattcctctcttttgatggcgaactcgacacccagccactcatagaacaactctggcgcgccggtaagcgcgtatatcttccagttttgcatccctttagtgccggtaatttgctgttcctgaattaccatccgcaaagcgaactggtgatgaacaggttgaagatccatgagccaaaattggatgtgcgtgacgtgctacccctttcccgattagacgtgctgatcacaccgctggtcgcctttgatgagtacggtcagcgcctgggaatgggcggtggtttttatgatcggaccttacaaaactggcagcactataaaacgcaaccggtgggttatgcgcatgattgtcagttggtggaaaaactccccgttgaagagtgggatatccctcttcctgcggtggttacaccgtcgaaagtctgggagtggtaagggcgatacacccgcatcgccctgattgacatcgttgattctttgacctaatttagtgagtaagggtaagggaggattgctcctcccctgagactgactgttaataagcgctgaaacttatgagtaacagtacaatcagtatgatgacaagtcgcatcataacccttctccttcaagccctcgcttcggtgagggctttaccgttacagccccatgctgccctgccatcgtaaatccccattaaataaacacaacgcattgatctgactttgatttattttctggagcagactcgcaaagtagaatgcgcaacgcggcaacggtgtggagaagggataaaaaaacgggcaagtcagtgacctgcccgttgattttcagagaaggggaattagtacagcagacgggcgcgaatggtacccggaatagctttcattgcctgcagcgctttttcggcaacgtcttcgtcggcttcaatatcaataaccacataacccatctgggcggaagtttgcagatattgcgcggcgatgttgacgccctgctcggcgaagattttgttcagcgcagttagcacgcccggacggttttcgtggatgtgcatcagacgacgcccaccgtgcagtggcagcgagacttccgggaagttcaccgcagagagcgttgagccattgtcagaatacttgatcaatttacccgcaacttccaggccgatattctcctgcgcttcctgagtcgaaccgccaatgtgtggcgtcagaaggacgttgtcgaattcacacagcggagaggtaaatggatcgctattggtcgccggttccgtcgggaatacgtcgattgccgcccccgccagatgtttgctcgccagcgcatcacacagcgccggaatatccaccacagtaccgcgcgaagcattaatcagcagcgagccgggcttcattagtgaaatttctttcgcgcccatcatatttttggtggacggattctctggtacatgcagactcaccacatcgctcatattcagcaggtcagaaagatgctgtacctgagtggcgttgcccagcggcagtttattttcaatatcataaaagtaaacatacattcccagcgattcagccagaatgcccaattgcgtaccaatatgaccgtagccgatgatacccagctttttgccgcgcgcttcaaaagaacccgccgccagtttgttccacacgccacggtgcgctttagcattggcttccggcacgccgcgcaatagcagcagcagttcgccaatcaccagctccgcaacagagcgcgtatttgagaacggtgcgttaaataccgggatcccgcgctttgccgccgcatccagatcaacctggtttgttccgatacagaaacagccaatagcgaccagtttttctgcggcgttgatcacgtcttcagtcagatgggtacgggatcgcaggccgatgaagtgggcatcgcggatggattcttttaattgttcatcatccagcgcgcctttgtgaaattcgatgttggtgtaaccagctgcacgaaggctttccagcgccttttggtgcacgccttctaccagcagaaacttaatcttgtctttctccagcgatacctttgccatttacccaatcctgtcttttgaaatgttgtgtgcggatttgcatccgcctttcaacatatcaaaaaataatattgcggcaatatgaacgtttgcgtcgcgatgttgaggaaatatcacgcaaaggtaattcttggatgaatatgctggtttagaggatttatttagagcaatcgacaattgcctggtaaaagcgtgacacatgtcaccaaatttaatgaagagaatttttttaacgggggaggttcccccgtcagatcatttcacaatggttttgacaccgtcaggtgtgccaatcagcgcaacgtccgcgccacggttagcaaacaagccaacagtcaccacgccaggaatcgcatttatggcgttttccatcgctatcgggtcaaggatttccatgccgtggacgtcgaggatcacgttgccattatcggtcaccacgccctgacggtattccggacgaccgcccagtttcaccagctgacgcgccactgcactacgtgccatcgggataacttctactggcagcgggaatttacccagaatatcaacctgcttggaagcgtctgcaatacagataaatttttctgcaaccgaagcaatgattttttcacgggtcagcgccgcgccgccgcctttgatcatttgcatgtggccgttgatttcatctgcgccatcaacgtagatgccaaggctgtcgacttcgttgagatcaaaaacgtgaatgccgaggcttttcagtttttcagtggaagcatctgaactggaaacggccccttcaatctggcctttcattgtaccgagcgcgtcaataaagtgtgcggcggtggaacctgtacctacaccaacaatggtgccgggctgaacatactgaagtgccgcccatcctactgcttttttcaattcatcctgcgtcatgatcgtttcgcctgtggtatgaaatttcacacgcattatatacaaaaaaagcgattcagaccccgttggcaagccgcgtggttaactcatccataaaatatcgcgcaatggcaggcatcccctttcgccccgcaaataaagcatacaacggtctgggtatgccgctccacggtgcaaacaggcgcaccagttcaccgttcgcaagcccctgtttacaggcaaattgaggcaataacgccacgccattcaacacaaccagggcgcgaactcgctgagcgaaatgcattagcgcaaatccctgatcttttaagctgcgcttttaaccacggatacaaatgttacccgccgacggcttcggtatatgcaacctgacacaaaattgtgtcatagtgcaggaaaaagcatttaccaggagcagacaacagcaatgaaacgcccggactacagaacattacaggcactggatgcggtgatacgtgaacgaggatttgagcgcgcggcacaaaagctgtgcattacacaatcagccgtctcacagcgcattaagcaactggaaaatatgttcgggcagccgctgttggtgcgtaccgtaccgccgcgcccgacggaacaagggcaaaaactgctggcactgctgcgccaggtggagttgctggaagaagagtggctgggcgatgaacaaaccggttcgactccgctgctgctttcactggcggtcaacgccgacagtctggcgacgtggttgcttcctgcactggctcctgtgttggctgattcgcctatccgcctcaacttgcaggtagaagatgaaacccgcactcaggaacgtctgcgccgcggcgaagtggtcggcgcggtgagtattcaacatcaggcgctgccgagttgtcttgtcgataaacttggtgcgctcgactatctgttcgtcagctcaaaaccctttgccgaaaaatatttccctaacggcgtaacgcgttcggcattactgaaagcgccagtggtcgcgtttgaccatcttgacgatatgcaccaggcctttttgcagcaaaacttcgatctgcctccaggcagcgtgccctgccatatcgttaattcttcagaagcgttcgtacaacttgctcgccagggcaccacctgctgtatgatcccgcacctgcaaatcgagaaagagctggccagcggtgaactgattgacttaacgcctgggctatttcaacgacggatgctctactggcaccgctttgctcctgaaagccgcatgatgcgtaaagtcactgatgcgttactcgattatggtcacaaagtccttcgtcaggattaatccatcaaataatgcctgatagcacatatcaggcgttgtcctcacttctttttgtattccttgaatcacatcacaaaatagacaaatctcaggcggcaaaaaacgacgtctgaatgcattttttttgctggcgacaaacccacgtaaaaagctcaccgtaggcgcaaataccctcattttgattgcgttttacggagcaaataatgtctaacgtgcaggagtggcaacagcttgccaacaaggaattgagccgtcgggagaaaactgtcgactcgctggttcatcaaaccgcggaagggatcgccatcaagccgctgtataccgaagccgatctcgataatctggaggtgacaggtacccttcctggtttgccgccctacgttcgtggcccgcgtgccactatgtataccgcccaaccgtggaccatccgtcagtatgctggtttttcaacagcaaaagagtccaacgctttttatcgccgtaacctggccgccgggcaaaaaggtctttccgttgcgtttgaccttgccacccaccgtggctacgactccgataacccgcgcgtggcgggcgacgtcggcaaagcgggcgtcgctatcgacaccgtggaagatatgaaagtcctgttcgaccagatcccgctggataaaatgtcggtttcgatgaccatgaatggcgcagtgctaccagtactggcgttttatatcgtcgccgcagaagagcaaggtgttacacctgataaactgaccggcaccattcaaaacgatattctcaaagagtacctctgccgcaacacctatatttacccaccaaaaccgtcaatgcgcattatcgccgacatcatcgcctggtgttccggcaacatgccgcgatttaataccatcagtatcagcggttaccacatgggtgaagcgggtgccaactgcgtgcagcaggtagcatttacgctcgctgatgggattgagtacatcaaagcagcaatctctgccggactgaaaattgatgacttcgctcctcgcctgtcgttcttcttcggcatcggcatggatctgtttatgaacgtcgccatgttgcgtgcggcacgttatttatggagcgaagcggtcagtggatttggcgcacaggacccgaaatcactggcgctgcgtacccactgccagacctcaggctggagcctgactgaacaggatccgtataacaacgttatccgcaccaccattgaagcgctggctgcgacgctgggcggtactcagtcactgcataccaacgcctttgacgaagcgcttggtttgcctaccgatttctcagcacgcattgcccgcaacacccagatcatcatccaggaagaatcagaactctgccgcaccgtcgatccactggccggatcctattacattgagtcgctgaccgatcaaatcgtcaaacaagccagagctattatccaacagatcgacgaagccggtggcatggcgaaagcgatcgaagcaggtctgccaaaacgaatgatcgaagaggcctcagcgcgcgaacagtcgctgatcgaccagggcaagcgtgtcatcgttggtgtcaacaagtacaaactggatcacgaagacgaaaccgatgtacttgagatcgacaacgtgatggtgcgtaacgagcaaattgcttcgctggaacgcattcgcgccacccgtgatgatgccgccgtaaccgccgcgttgaacgccctgactcacgccgcacagcataacgaaaacctgctggctgccgctgttaatgccgctcgcgttcgcgccaccctgggtgaaatttccgatgcgctggaagtcgctttcgaccgttatctggtgccaagccagtgtgttaccggcgtgattgcgcaaagctatcatcagtctgagaaatcggcctccgagttcgatgccattgttgcgcaaacggagcagttccttgccgacaatggtcgtcgcccgcgcattctgatcgctaagatgggccaggatggacacgatcgcggcgcgaaagtgatcgccagcgcctattccgatctcggtttcgacgtagatttaagcccgatgttctctacacctgaagagatcgcccgcctggccgtagaaaacgacgttcacgtagtgggcgcatcctcactggctgccggtcataaaacgctgatcccggaactggtcgaagcgctgaaaaaatggggacgcgaagatatctgcgtggtcgcgggtggcgtcattccgccgcaggattacgccttcctgcaagagcgcggcgtggcggcgatttatggtccaggtacacctatgctcgacagtgtgcgcgacgtactgaatctgataagccagcatcatgattaatgaagccacgctggcagaaagtattcgccgcttacgtcagggtgagcgtgccacactcgcccaggccatgacgctggtggaaagccgtcacccgcgtcatcaggcactaagtacgcagctgcttgatgccattatgccgtactgcggtaacaccctgcgactgggcgttaccggcacccccggcgcggggaaaagtacctttcttgaggcctttggcatgttgttgattcgagagggattaaaggtcgcggttattgcggtcgatcccagcagcccggtcactggcggtagcattctcggggataaaacccgcatgaatgacctggcgcgtgccgaagcggcgtttattcgcccggtaccatcctccggtcatctgggcggtgccagtcagcgagcgcgggaattaatgctgttatgcgaagcagcgggttatgacgtagtgattgtcgaaacggttggcgtcgggcagtcggaaacagaagtcgcccgcatggtggactgttttatctcgttgcaaattgccggtggcggcgatgatctgcagggcattaaaaaagggctgatggaagtggctgatctgatcgttatcaacaaagacgatggcgataaccataccaatgtcgccattgcccggcatatgtacgagagtgccctgcatattctgcgacgtaaatacgacgaatggcagccacgggttctgacttgtagcgcactggaaaaacgtggaatcgatgagatctggcacgccatcatcgacttcaaaaccgcgctaactgccagtggtcgtttacaacaagtgcggcaacaacaatcggtggaatggctgcgtaagcagaccgaagaagaagtactgaatcacctgttcgcgaatgaagatttcgatcgctattaccgccagacgcttttagcggtcaaaaacaatacgctctcaccgcgcaccggcctgcggcagctcagtgaatttatccagacgcaatattttgattaaaggaatttttatgtcttatcagtatgttaacgttgtcactatcaacaaagtggcggtcattgagtttaactatggccgaaaacttaatgccttaagtaaagtctttattgatgatcttatgcaggcgttaagcgatctcaaccggccggaaattcgctgtatcattttgcgcgcaccgagtggatccaaagtcttctccgcaggtcacgatattcacgaactgccgtctggcggtcgcgatccgctctcctatgatgatccattgcgtcaaatcacccgcatgatccaaaaattcccgaaaccgatcatttcgatggtggaaggtagtgtttggggtggcgcatttgaaatgatcatgagttccgatctgatcatcgccgccagtacctcaaccttctcaatgacgcctgtaaacctcggcgtcccgtataacctggtcggcattcacaacctgacccgcgacgcgggcttccacattgtcaaagagctgatttttaccgcttcgccaatcaccgcccagcgcgcgctggctgtcggcatcctcaaccatgttgtggaagtggaagaactggaagatttcaccttacaaatggcgcaccacatctctgagaaagcgccgttagccattgccgttatcaaagaagagctgcgtgtactgggcgaagcacacaccatgaactccgatgaatttgaacgtattcaggggatgcgccgcgcggtgtatgacagcgaagattaccaggaagggatgaacgctttcctcgaaaaacgtaaacctaatttcgttggtcattaatccctgcgaacgaaggagtaaaaatggaaactcagtggacaaggatgaccgccaatgaagcggcagaaattatccagcataacgacatggtggcatttagcggctttaccccggcgggttcgccgaaagccctacccaccgcgattgcccgcagagctaacgaacagcatgaggccaaaaagccgtatcaaattcgccttctgacgggtgcgtcaatcagcgccgccgctgacgatgtactttctgacgccgatgctgtttcctggcgtgcgccatatcaaacatcgtccggtttacgtaaaaagatcaatcagggcgcggtgagtttcgttgacctgcatttgagcgaagtggcgcaaatggtcaattacggtttcttcggcgacattgatgttgccgtcattgaagcatcggcactggcaccggatggtcgagtctggttaaccagcgggatcggtaatgcgccgacctggctgctgcgggcgaagaaagtgatcattgaactcaatcactatcacgatccgcgcgttgcagaactggcggatattgtgattcctggcgcgccaccgcggcgcaatagcgtgtcgatcttccatgcaatggatcgcgtcggtacccgctatgtgcaaatcgatccgaaaaagattgtcgccgtcgtggaaaccaacttgcccgacgccggtaatatgctggataagcaaaatcccatgtgccagcagattgccgataacgtggtcacgttcttattgcaggaaatggcgcatgggcgtattccgccggaatttctgccgctgcaaagtggcgtgggcaatatcaataatgcggtaatggcgcgtctgggggaaaacccggtaattcctccgtttatgatgtattcggaagtgctacaggaatcggtggtgcatttactggaaaccggcaaaatcagcggggccagcgcctccagcctgacaatctcggccgattccctgcgcaagatttacgacaatatggattactttgccagccgcattgtgttgcgtccgcaggagatttccaataacccggaaatcatccgtcgtctgggcgtcatcgctctgaacgtcggcctggagtttgatatttacgggcatgccaactcaacacacgtagccggggtcgatctgatgaacggcatcggcggcagcggtgattttgaacgcaacgcgtatctgtcgatctttatggccccgtcgattgctaaagaaggcaagatctcaaccgtcgtgccaatgtgcagccatgttgatcacagcgaacacagcgtcaaagtgatcatcaccgaacaagggatcgccgatctgcgcggtctttccccgcttcaacgcgcccgcactatcattgataattgtgcacatcctatgtatcgggattatctgcatcgctatctggaaaatgcgcctggcggacatattcaccacgatcttagccacgtcttcgacttacaccgtaatttaattgcaaccggctcgatgctgggttaatgactcgtcccgtcacgatcttcagcaatatgctgaagcatcgtggcggtataacgatgatttctgattgaataaagatattcctgcatatacatcggcctgtgcggtgcatcaaaatatttcagcgttgccggattcaccagtcgccaggcaaaatgcgggatcaccgtcagaaaatgtccgcgctccacggcgctgattttggccataaaactgtagggacgataaataatggttggattgatcccacaaggtcgcatattcgcatcaatcattgcttcgaagttggcccggttctgaaagcgcatttgtagccagggcagctcctgaagcagctcttgctcttgtcgctcttcataacggcgagaaacgagaaagcctaatcgcagcggtggtagttcactgatagtcaggttttccagttcctgaactcgtgcagatacatgctgtggggagataataaaatctaactggcggtcaaaaagattatcgataacgccattttcgctgaactcaactggctgggcggtcacgccttcatacttatctccgagactaatcaactgatcgaaaataattgtcggataagtattatctatgccaatcacaatttctcgtgaacgacgccctgagttatggatttcattatcaatcgcagaaagccgttgataaaccgggaacagtttttgatacagttcctgtccggctttattgaggctgatattattatctttgcgggtaaatagcgtatagccaatttgttcttccagcgcggcaatgcttttaccaaatggcgaagccgtcatatggattttttctgccgcccgggcaatattattggtttgcgctaataaaatgaaattgcgcatctttttcgaaataaaaatgtccatccccctcccccgcatccttgtccgcttaaccgtttcagtcagcctatccttgatgaaaccgcgagcaaagataggtgattacgtcatggttttacagaaaattacagaaaaaggaggcaatatcgggtaaaggcattagcccgacgaatacgtcgggctacaaatattattgtgctgcaggtgttttagcgggttgttgatccacaggttctaactggaagaccacatcgacctgatcatcaaactgaatagcggcctgctcgtaagtttcctgggcggacaccggcgcggcatcggctttcatcatccgcaccattgggctgggctgatagttggaaacatggtagcgcacgctatataccggccccagtttacgatgaaagccgttcgccagttcctgcgcctgatgaatcgcgttatcaatcgctgccttacgcgctttgtctttataggcatccggctgcgccacgcccagcgacacagaacgaatttcgttaagacccgccttcagcgcgccatccagcaaggaattcagtttgtctaactgacggagcgtgacttccaccgttctcacagcgcggtagcctttaaggatacttttaccatcctgataatcataatctggctgggtgcgtaagttcgctgagctgatatcttttttcgcgatctgattgagttcaaggaaggaaatgtattgtgcgacgcgctcatctgcctgtttcttggcagtagcggcatccttcgcggccacgttaacttcaatcgcaagagtggcaatgtctggcaccgcatccacgcttgccgtaccggaggtgacaatatgcggtccatccggcaattcgttagcctgcgctgccatcccgctaatacccattaatgccgccagggcgataactttgaacttcacgttagtctctccgtgttaattgacttgcccaaaattcaggacctctggaggcaagcttagcgcctctgttttatttttccatcagatagcgcctaactgaacaaggcttgtgcatgagcaataccgtctctcgccagctgcaaggcaataaaccacataacacatcccacaaccagattgataatgcgctgtgcttttgccgtgcgcagacgcggtgccagccaggctgcgagaagagccagaccaaagaaccacaggaaagaggcgctaattgtcccgagtgcaaaccagcgttttggttccacatcaagttgcccgccaaggctgcccagtacaacaaaagtatccaggtaaacatgcggattcagccaggtcactgccaacatggtggcgataattttccatctgccttgcttcatgacttcggcgctggctaactcaatattactgctcattgctgttttaaaagcgccaaaaccataccacagcaagaaggctacgccgccccaggtgaccagcgccagcaaccacggcgactgcatcaataacgcgctgccaccaaaaatcccggcgcaaatcaggaccaaatcgctgatagcacaaagtaaggcaatcataatgtggtactgacgacgtatgccctgattcatcacaaaagcattttgtggaccgagcggtaggatcatagccgccccaagtgcaagaccttgaaagtaataagaaaacacgttggatattccgaattaagtatctgatgcagagactatatcgcgggattgttattagcggaaattgataatattaattggcaatcagaaaaactaataagagagaggccagagagtattatctggcctcagcgttgattacgcagctttgtcttctttcacccgcttaaagttcacatccatttgcgggtacgggaagctgataccggcggcatcaaattcacgtttaatacgctccagcacatcccagtacacgttttgcagatcgccgctgttgctccagacgcggaccacgaaattaatcgacgatgcaccaagttcgttcaggcgcacagtcatttcgcgatctttcaaaatgcgatcttcagactggataatattggtcaggatctgcttaacctgatcgatatcggaatcatacgccacgccaataataaattcgttacggcgaactggctcgcgggagaagttaataatatttccggcaataattttaccgttcggaataacgataattttaccgtctgcagtacgcatggtggtggagaaaatctgcacactcagcacagtaccggctacgccgcccaggtcaacatattctccggcacggaacgggcggaacatgacaagtaacacgccagcggccaggttagacagtgacccctgcaaagccagaccaacagctaagcctgcggcaccgagtacagcaatgactgacgcggtttgtacacccacgcgtcccagtgcagcgattagcgtaaaggcgataataccgtaacggactaatgcagaaagaaaatcagcaacagtggcatcgattttacgggagatcatcaggcgattcaccgcgttggaaatcatccgcgcgataatcaaaccaacgatgatgatcgcgagtgccgccacgatgtttactgcataacttagcagcagcgcctggttagctaccagccagcttcccgcgccgtttatgctatcgacaacattcaaatcttccattcaatattccttttcaactgactcaaaatggagaaatacactccgccgccttatgacgggcagtctgacaagggtaaacaataaagcataattttgccaaatagatcacagatttctcatctgaatcaccttgcttttggcgaaaaaatccccgcagagcggggctcagacagatatcaatgtgcgctttgtcatgccggatgcggcgtgaacgccttatccggcctacaaaaacctgcaaattcaatatattgcaggatacgtgtaggcctgataagcgtagcgcatcaggcaattttgcttttggcgaaaaaaagacccgcagagcgggccttgagataagcagaaaggaatatcttacagaacgtcgatcgcgttcagttcctggaatgctttctccagacgagcgatcatcgaagtctgaccggcacgcagccatacgcgcggatcgtagtatttcttgttcggctgatcttcgcctttcgggttacccagctgaccctgcagataagcttcgttcgctttgtagtagttcagaacgccttcccaggttgcccattgggtatcggtatcgatgttcatttttactacgccgtagcttacggagtctttgatttcctgagcagtagaaccggaaccaccgtggaatacgaagttcaggctgttgtgcggcaggttgtgtttcttggaaacatattcctgagaatcacgcaggatggtcggagtcagaaccacgttacccggcttgtaaacaccgtgtacgttaccgaaggacgctgcgatggtgaaacgcgggctgattttgctcagttcggtgtatgcgtaatcaacgtcttccggctgggtgtacagtgcagaagcgtccatgtggctgttgtccacgccgtcttcttcaccaccggtgcaacccagttcgatttccagagtcatgccgattttggacatgcgctccaggtatttagagcagatttcgatgttctcttgcagagattcttcagacaggtcgatcatgtgagaagagaacagcggcttaccggtagctgcgaagtgtttttcacccgcgtccaacagaccgtcgatccacggcagcagtttcttcgcgcagtggtcagtgtgcaggataaccggaacaccataatgttcagccatctggtgaacgtgatgcgcaccagagatcgcgcccaggatagcagcaccctgcggaacgtcagatttcacgcctttaccagcgataaaggaagcaccaccgttggagaactgaacgataaccggcgctttaactttagcagcggtttccagtacggcgttgatggagtcagtaccgacgcagtttactgctggcagtgcgaagttgttttcttttgctacctggaaaactttctgtacgtcatcaccagtgattacgccaggttttacgaaatcaaaaatcttagacatgtctcttgtcctgtatcgtcgggccttatactcgtcatacttcaagttgcatgtgctgcgtctgcgttcgctcaccccagtcacttacttatgtaagctcctggggattcactctcttgtcgccttcctgcaactcgaattatttagagtatgaaaaattgcgtgctctaaaagcgcgctgaaacaagggcaggtttccctgccctgtgattttttacttcttagcgcgctcttcgagcatcgctactgcaggcagtactttaccttccacgaattcgaggaatgcgccgccgccagtggagatgtaggagattttgtcagcaatgccgaacaggtcgattgctgccagagtgtcgccgccgccagcgatggagaacgcttcgctgtctgcgatagcgttagccacgatttcagtacctttgcggaagttcgggaattcgaacacgccaaccggaccgttccacagaatggttttcgcattcttcaggatttcagccagttcctgagcggaagcatcaccgatatccaggatctgctcgtcagctttcacatcgttaacagatttcagggtagccggtgcagtttcagagaactcggttgctacgcgaacatcagacggaaccgggatgttgcaggtggtcagcagacgtttagcttcgtcaaccaggtcagcttcgtacagggatttacccacatcgtggccttgtgccgcgataaaggtgttagcgataccaccaccaacaatcagctggtcagcgattttagacagggagtccagaacggtcagtttggtagatactttagaaccaccaacgatagccaccatcgggcgagcaggttctttcagtgctttacccagcgcgtccagttcagctgccagcagcgggcctgcgcacgcaacgtcagcgaatttaccgataccgtgagtagaagcctgcgcgcggtgagcagtaccgaatgcgtccattacgaacacgtcacacagtgcagcgtattttttggacagggtttcgtcgtctttcttctcgcctttgttgaagcgaacgttttccagaacaaccagttcaccttcagcaacgtcaacgccgtcgaggtaatctttaaccagacgaaccgggttagacagtttgtctttcaggtagttaacaaccggcagcagagagaattcttcgttgtactcgccttcggtaggacgacccaggtgggaagttaccatcacttttgcgccttgtttcagggccagttcgatggtcggcagagaagcacggatacgcgcgtcgctggttactttcccgtcttttactggtacgttcagatccgcacggataaatacacgtttcccagcaagatccagatcggtcatcttaattacagacatggtgaatcctctcgttgattctaaaagttttgcagacgctgcttgcgtcttacctgaaagcaacagtagccatagctaacgtcgtgtcgagcattcggttagcaaagccccattcgttatcgcaccagaccaacgttttgatcaggtgtgcgccactgacccgggtttgggtgccatcgacaatggcactgtgcggatcgtggttaaaatctacagagaccaacggcaattccgtatagtcaactataccatgaaatgcaccttgtgctgctttttgcagcaacaggttgacttcattggcttttacaggtttcttcaccgtcacgcttaaatcgattgccgtcacatttatggttggcacacgtaccgcaatcgcttcaaagcgatcgttaaattgcggaaaaaatcgtgtgataccggcggccagtttagtatcgaccggaatgatcgactggctggctgcccgggtgcgacgcaggtcaggatggtatgcatcaataacctgttgatcgtgcatggcggagtgaattgtggtcacagtgccggactcaataccgtacgcatcatctaacaatttgatgacgggaattatgcaattcgtggtacaggaagcgttagaaacgatgcggtgttccgcacgaagttgatcctgattgacgccgtaaacaacggtcgcgtcgagatcgttactgccaggatgtgaaaagagcacttttttggccccggcggcaatatgcgcttcgccatgctcgcgggagccatatacgccggtgcagtcgaggactacatcaacgccaagttcacgccaggggagcgattgcagtgaacgttcatgcaatacgcggatggcgtcatcaccaacaaaaagttgatcgcgttcctgtcgtacttcccatgcaaaacggccatggctggtgtcatatttcaacaaatgcgccatgcccgcagcatccgccagttcgttgattgccaccacggtaatttccgcccggcgtccggattcatacaaagcacgaaccacattacgcccgatgcgaccgaagccatttatcgctacgcgtacggtcatagatctcctgcaaggttttccctgagcaaatttgccagacagagtaatccagcaaatcgtccggggaaaccttacctgtcgcaaactgcgactgattggttaattgtcgaacatttaatcgactgaaacgcttcagctaggataagcgaaacgtggaataaaaggaatgtttgtccagccgaagaagacatttatctgactcacatcacacttttatccccttttgtgggaagctttattccaggctggcgtaataataaccctacaataactggaataaattgtcagcttgtgaagtgataccggccttcttcagtcatctctactatcagattggcctgacggctattcatcagcacacgctcgacattggggccatcggtgcgggcataaaatgcttcggctacttgccgcgttaatcctcccgcaattttacgactaatcaagcgctcccgcagaatttgagcaggtgcatgaataaaaatagaaaaatcgcagaaagatgccaactccagccacttttcatcatccagtaacaaccagtttccttcgacgatgacgagtggtgcggtaacgtgcaacgcatcttcaacaggatcatgcttttgtcgatcgtactgcggccacgtacaatccccttccacgacctggcgcagattttccgtcagtttcgcaacgtcaaatgtctctggtgcgcctttgaaggggcgcaattgatgcgcatccagccagctattgtaatggtgaaaaccatccatcgggagcgtctgaatagcgggcagttccgggtcttgttgcgcgagatattcccagaaggtggttagggttgatttacccgtccccggcggagcgcaaagaaaaaccaccgtacgccgctgcggatttaccgtctgtaaggccgccaacatgtgcagcaacggtttatgtacattttcaatctcttcgttctggtactgtgcctgtatcttcagcccattcaccgttaattcaattttcacggcgttaattcctttaaggtggtcgttactgccagcgtcagcgccgttttgaccattccgctaaaacgcgcctctgaccagacggagaaatcagcgaacttcatcgcttttaacgcgtcatagagcatcgcattgcgggttatgctattgacgttgctgataaaatcccaggtcatgtcatcggcaaatccgggcgtttcatcctgttcgttcaggtaatgccagaactgggaaaaatgcgtgatatcggcgtacaaccatttatccattttccccaacgcataaatcaaacgcagtgcaacatcaatatcgtcaagcgggccgctttgggcgagtaacggcttcactgcatattccacgatctcttcatcgttatcgacaaacagcgacggcagaaactggcgtatcccctggagcaaaatggtatgcgcagttttcataaatgaaaataaattgtcctgtgcatccagttgctcaagcacatcatcttctgtcagcgtcgccattggtcttccgatagatcaccatcaatgcagggagtctattatattacacgtttggtccgcgccgccgatcagtaatgtctgcgtccgcaccccattcgccgtctgttggataccgttcaccagctcaccgcccgtcacgcccgtagcgctaaagaggatatcgttccccctcaccagttcatcgagcgagtacacacggttaacgtcaacgcccattgccttgcaacgcttgcgctcctgctctgcaatctgccgattttccgtgtaatcccctttagcctggcaaaagtcaatcagctcggcctgcatatccccgcctaatgctttaacggcacaggcagaaatcacgccttctggcgcaccgccgatggtgtacatcacatcgtaaggattatcctgccagcaggtcagcacgctggcggcgacatcgccatccggcagggcaaaaaccttcacgcccagctgtgttgcttcctcaatcgcggcactcaggcgcggtttatccagcgtaaccatgcgcagcttatccagcggtttgcctaacgctttcgccacgttgcgcaggttgtccgtcagaggcaaagacagatcaatcgcgcccgccgccagccgattaacaaccagctttttcatatacatatcgggcgcatgtaacaggctatctcgaggggcgaaagccatgaccgccagcgcattgctctgccccatcgccaccatccgcgtgccttcaatgggatcaaccgcgatatcgacttctggcccatcgcctttgcccacctcttcgccaatccacagcatcggcgcatggtcaatttctccttcgccgataaccactcgtccacgaaaagcgacgtcgtttaatgcctggcgcatcgcggtgaccgccaggccatcaattttatttttgtcgccacatccggtttgcggccaggcagccaacgctgcctgttccgtaacgcgaaataatggccacgccagggacatcattgcgcggcctccccgatatcaacgccaaattgtgccagcagatatttctcggcctgttcattccagatgccgtgcgtttcctcaaccagccgcgccaactctttaaacagcggatcggttttgcctttttcggcaaaatcggcaatggcagtgagcggcatggtcacgccgttataaatgagttttttaccgccagggatatccggcagattgagcacggtttctggcaccgcatccaggccaccgatatgggtcaccataaacgacggctgtaactgcccagtggcgctaagggcaatcgcctctttcatgtcgtccgttgaaccgccagatgtaccgacgacgtgcgtgctgttgtaatggacgttgtagaaattaaacggcactttgaagtttttatccgtcggcccggcaaagaagttcagacagccatcttccgccagtaattcatcagccatctcaacgacagcaggcaccgccgcataaacaaaaatgtcatcgaacccggcatctcctgtcagcgcccgcagcatctggacaggatcgctcatccctttggtattcacatacaccagctcaatgcctttactggccgccagttccaccggcagcagcttctgtacctgcgccagacgtttgtcgtcgatatcgaccaccaccacccgcgacggttgtatgccgccgttaatggcgtaatcgatagcgccaatgcccatcggacctgcacacgccagcagtgcaatattgccgccaggtttgacgcccatgcgatgctcataaacatattgcgtggtgtgataattggcatgataagcaccaataatgcagcacataggctctgccagcgacgccgcagcaaaataagagccgtgatacggtaatacgcagcccaaattaatggcgatttcgggaataatcatataagtggcattgccgccaaaatattcgtagctgtagcccgctgaatatccgcttggtaaccccatcgccggttgcaatacaaaacgctggccttttttatatttgccagtgagatttttacccacttcgacaataaccccggcacattcatgcccggtaatgaccggatgattttctaaatcgtcgggtacgcgtttatgttcactaccgagtaacgccgctttccaggtcgataaacagacgctgtcagaaattacactcaccagtaattcattatcggtaatttctggcagttcaaatacgcgcagacggacatcccgcttgccataaatagcagcaactttggttttcatttttacctctgtaatcagtgtttatgttcggcggttaattgattaaataaagtgtcgagttttggatcgccaatatagttattaatcaatatcagtggtttatccgtcacacgtttcacgcgcccttccagactggcatgagtaacgacgatatccgcatccgcaggcacgttttctatggcgtaatgttttacttcaattgccagccccgctttttccaggcgtttacggaaggtggtcgcgcccatcgcactggagcccatccccgcatcgcaaacaaaggcgatacgcttaaccctgcttaacgagaatgcaccctcttgtttcatcgccttaaccgcattggctgactgagcaaactcatcttcgctctccgtttccaccgttttttccatcttcagtatcagcgaagtaatagcaaaggacaccagggtacctaccgtaacaccggcaattgtcgccaggaacgagcctttcggcgtcagtgccaggtaagcaaagatagaccccggacttgggccagccaccagaccaccgtccagtaagttaaacatccaggtgccagacataccgcccgcaatcatggcaataatggtcagcggcttcatcagcacatacgggaaatacagttcgtggatcccaccgaggaagtgaataatcatcgccccgggcgcagaacgtttactcatccctttaccaaacaaggtaaacgccagcagcagccccaggcccggacctgggttagaggccaccataaagaagatggatttaccgttaaccgaagcctgttgcattcccagcggataatagacgccctgatcgatcgcattattgaggaaaagcactttcgccggttcattgatgactgacaacaatggcagataacccgcatgtaccagcgcctcaatacactctttgacgaaagtattggcaattaacaccgccgggccgataacttcaaaacccagcagacaaaggagcatccccgcgatacctaatgagaagttattgataaccatctcaaaaccggcaggtatgcgtttttccagtgccttatcgacatattttatgaccaacccaccgagcggccccatgatcattgagccaaggaacatcgggatctctgcgccaacgatcacaccaatagtacctattccgcccatgaccgccccgcgtttaccgccgaccagatgaccacctgtagaaccaatcatcacgggcaataaataggtaatcatcgggccgacaattttggcgaaatgttcgttaggcagccaaccggtgggaataaataacgcagtaataaaaccccaggcaataaaagcaccaatattggggatgaccattgcagtcaaaaagcccccaaaagcctggacctttgcacgagcagacttgttttccataatattatcctgtagaggagagagtaattatccgcggctgataatgtccgctaattgtttttctgatgatgctgttaagagttgttcgagtatttcttcttcgcacagtaattcacttaacgcctgaatagcgccaatgtgcgaatcggcatcggcagcagagagtccgatgagtaatttaattggttcgtcattccccggaaaataaacaccttgttcaagtaatgtcaaagacatcccggttttaagcgccccacattccggtcgcgcatgaggcattgccacgcctggtgcgagaatataataagggccattgttaatggtggaatctttaattgcctgaatgtaattctcgctgatatagtttttatccagcaatgataccatcgagaaatcgatagcttcctgccaatcttttgctgaatgtataactgagattgatgattctggaaaataatcactaagccgcataaattatccttattttatttttagggtaccgtccggcggtaaaaataaaatactcgtgcggtttaatgaaagcaattgagcagggaaaccggtgttttgaaaacagtgaattattaatttcttatataacattgagttatagatataacaacaaatgtcaatacgcatatcgtgatgcatattacataattgatatttattgcatataaatatttgtgatctacaacacgccttatctattgcttgtccgcaaacggacatatcaaggtaataaaaaaggtcgccgaagcgacctttttacccgaaatgctaattacagcagttcttttgctttcgcaacaacgttatcaacagtgaagccgaactcttcaaacagcagctctgccggagcagattcaccgaaggtggtcataccgacgatagcaccgttcaggccaacatacttgtaccagtagtcagcaatacccgcttctacagcaacgcgtgcagtaaccgctttcggcagtacggattcacggtaagcagcatcctgcttgtcaaatgcgtcggtagacggcatggacaccacgcgcgctttcacgccttcggcagtcagtttttcgtaggcagcaacagccagttcaacttctgaaccggtagcgatgaaaatcagttccggctgaccggcgcagtctttcagcacataaccaccgcgcgcgatgtttgccagttgctcttcagttcgttcctgctgcgccaggttctgacgggagaggatcagtgcggtcgggccgtcctgacgctcaacaccgtatttccacgcgaccgcggattcaacctggtcacacggacgccatgtagacatgttcggggttacgcgcagagaagcgacctgctcaaccggctggtgagtcgggccgtcttcgcccagaccgatggagtcgtgggtgtaaaccatcacctgacgctgtttcatcagcgcagccatacgtacggcgttacgtgcgtattccacgaacatcaggaaggtggaggtgtacggcaggaagccaccgtgcagggagataccgttagcaatcgcggtcataccgaactcgcgaacaccgtagtggatgtagttacccgcagcatcttcgttgattgctttagaaccagaccacagggtcaggttagacggcgccaggtcagcagaaccgccgaggaattccggcaacagcggaccgaacgcttcgatagcattctgagacgctttacggctggcgattttcgccggattagcctgcagtttagcgatgaactctttcgctttagcgtcgaagtcagacggcatttcgcctttcatacggcgggtaaattcagcggcttcctgcggataagctttcgcgtaagcagcgaatttctcgttccatgcggattctttcgcctggcctgcttctttcgcatcccactgagcatagatttcagacgggatttcgaacggcgcatatttccagcccagttgttcgcgggtcagggcaatttcagcgtcgcccagcggcgcaccgtgggagtcgtgggtaccggctttgttcggggaaccgaaaccgatgatggttttgcacatcagcagggaaggtttgtcagtcactgcgcgcgcttcttctactgcgcgtttgatagatgccgcgtcatgaccgtcgatgtcgcgaataacgtgccagccgtaagcttcgaaacgcattgcggtgtcgtcggtgaaccagccttcaacgtgaccatcgatagaaataccgttgtcatcgtagaatgcaatcagtttacccagcttcagcgtacccgccagagagcaaacttcgtgggagatgccttccatcatgcagccgtcgcccatgaaggcgtaggtgtagtggtcgacaatgtcgtggcccggacggttaaactgcgccgccagcgttttttctgcaatcgccataccgactgcgttggcaataccctgacccagcggaccggtggtggtttccacaccagcggtgtaacccacttccgggtgacccggagttttagagtgcagctgacggaagtttttcagttcttccatcggcagatcgtaaccggtgaggtgcagcaggctgtagatcagcatggagccgtggccgttggacagcacgaagcggtcacggtcagcccaggacggattctgcgggttgtgtttcaggaaatcacgccacaggacttcggcaatgtcagccatacccataggggcacccgggtgaccggatttggctttctgtactgcgtccatgctcagcgcacgaatagcattggcaagctctttacgtgaggacattttgactccagatcggatgatgaagggcacgcccttaacgacttgacgacagcgcgttttgggctacgccggaaaatttgccaacaatttaccgcaagccgcgcgtcatgtacatggaacatccttttgccgcttcagaaatctctggatcatgctcgcatgttgcgcaatctactcgcccgtccgctgcgcttttccttatactgagactgagcgtcgattcacctgcaaacggcgcatttttagaataatcctgaccttgtgcggaagagaaaacatgaaaattcgcgccttattggtagcaatgagcgtggcaacggtactgactggttgccagaatatggactccaacggactgctctcatcaggagcggaagcttttcaggcttacagtttgagtgatgcgcaggtgaaaaccctgagcgatcaggcatgtcaggagatggacagcaaggcgacgattgcgccagccaatagcgaatacgctaaacgtctgacaactattgccaatgcgctaggcaacaatatcaacggtcagccggtaaattacaaagtgtatatggcgaaggatgtgaacgcctttgcaatggctaacggctgtatccgcgtctatagcgggctgatggatatgatgacggataacgaagtcgaagcggtgatcggtcacgaaatggggcacgtggcgttaggccatgtgaaaaaaggaatgcaggtggcacttggtacaaatgccgtgcgagtagctgcggcctctgcgggcgggattgtcggaagtttatctcaatcacaacttggtaatctgggcgagaaattagtcaattcgcaattctcccagcgccaggaagcagaagccgatgattattcttacgatcttctgcgccaacgcggcatcagcccggcaggtcttgccaccagctttgaaaaactggcaaaactggaagaaggtcgccaaagctcaatgtttgacgaccatcctgcatccgccgaacgcgcccagcatattcgcgatcgcatgagcgcggatgggattaagtaaagcctggtggtgtcgaacgtaggtcagataaggcgttcacgccgcatctgacatgaatggcacatttgttaccttgtgcgcattgccggatgcgatgctggcgcatcttatccggcctacgggtgccgaacgtaggtcggataaggcgttcacgccgcatccgacattaatggcacgttttacccgtgcgcatcgcatctggtgcttactcgccctttttcgccgcctgaatatacagcatttccagcgccagcgttgccgctgccagagcagtgatttccgactgatcgtatgccggagccacttccactacgtccatcccaacaatgttgagatctttcaggccgcgtaccagtttaatagcgcgatcggaggtcaggccgccaatcactggcgtaccggtgcctggtgcaaaagcaggatccaggcagtcgatatcaaaagtcaggtaaaccggcatatcacccacaatctgtttcacttgggcgataacgtcatccacgctgcgatcgttcacctggcaggcgtccagcacggtaaagccgttgtctttatcaaactcggtacgaataccaatctgcacggaatgattcgggtcgatcagaccttctttcggcgcggtatagaacatagtgccgtggtcaaattcacaaccgttcgcataggtatcggtgtgggcgtcaaagtgtaccagcgccattttgccgaaatgcttcgcatgagcacgcagcagcggcagcgtaacaaagtggtcaccaccgaaagagagcatacgcttaccggcagccagcagcttctcggcgtgcgcctgcagcttttcgctcatctcacgggcatcgccaaaggcatataccagatcgccgcagtccacgacgttcagacgctcacgcatgtcgaaattccacgggaagcggttgtgttcccaggccagattcgtcgaaacctgacggatcgctgccggaccgtggcgaccacccgcacgaccagaagtggccatatcgaacggcacgccagtaatcacccagtctgcatcgctgtcatacggctggaagttcatcggcaggcgtaaaaaaccaaaggcattggaaaccagtgagttatcgtattgatgacctaaggtgctcatggatggactcctattacaaagtcgatataaaaaaacccttccgcgtcgttaggcccgacgaggaagggttggatttgtcacaataaattgtggcggattatcaccgctaaattaagcggattcaagtaacacaggacttactcatcttcaagataagtataaccgtacaaacctgcctcgaactcttcaaggaactgttgttgcagttcagcatcaagatcggttttcttcacttgatcgcggaactgggttaacagcgttttcggatcgagctgtacatattgcagcatgtccgccacggtatcgccttcgtcagacagttctacttctacgctaccgtcagggaagacgaacacgtcaaccgcttcggtatcaccgaacaggttgtgcatgttgccgaggatctcctgatatgcgccgaccataaagaaaccgagcatcggcggattctctggatcgtactccggcattggcattgtcgtggcaataccgtcaccatcaatatagtggtcgatagcaccgtcagagtcacaggtaatatccagcagcacagcgcgacgttccggcacttgatccagcccttccagcggcagaaccgggaacaactggtcgatcccccatgcgtccggcatcgactggaacagcgagaagttgacgtacattttgtccgccatacgttcctgcagctcgtcgataatcggacgatgagcacggttttgcggatccagctgcttttgcacttcatggcacatgctcaaataaagctgctcagcccatgcacgttcttgcaggctaaagatgccggaagagtagccgatatgaatgtcgtgcagatccatctgactgtcgtgtaaccattcacgcagagaacggcgagttcccggttcgtgcatctcctgccaggtttcccacatgctttgcagcgcgcgcggcgcatcttctgcaggcgcggtcggcaccgtgtattcgttacgttccacgccgatgatattagacaccagcacggtgtgatgcgcagtcaccgcacgacccgattcggtgattaccgtcggatgcggcagaccgttttcttcacacgcatcgccaatcgcccagataatgttgttggcgtattcattgaggccgtagttcaccgaacagtcggactgcgaacgagtaccttcataatccacgcccagaccgccgccgacgtcgaagcactgaatattgacgcccagcttgtgcagttccacatagaaacgcgcggattcacgaacgcctgtcgcgatatcgcgaatattcgccatctgcgaaccgaggtggaagtgcagtagttgcaggctgtcgagacgcccggcttcacgcagggtttcaaccagttgcagtacctgagtcgcagccaggccgaacttcgatttttccccgccggaggactgccatttacccgaaccctgcgaagccagacgtgcacgcacgcccagacgaggaacgacattcagacgttctgcttcatccagcacaatggcgatttctgacatcttctcaatgaccagatagaccttgtgccccatcttctcgccaattaatgccaggcggatatattcgcggtctttataaccgttgcagacgatgacgctacgggtcatgccagcatgtgccagtactgccatcaactcggctttggaaccggcttccagacccagcggttcgcccgaatgaatcagggactcaatcacgcggcggtgctggttaactttgatcggataaacaaggaagtaatcgccgttatagccgtaggattccctcgcacgtttgaacgcggcgttaatggaacgcaaacggtgctgcaggatctgtgggaaacagaacagtgcaggcagacgctggccctgtgcttcacgagttttcactaactgcgcgagatcgacgcgagcttccgggacgtccgggtccgggcacacgctaatgtggcccagctcgttaacgtcatagtagttattgccccaccaggcaatattgtaagtacgcagcatcttgctggcttcctgggagctcattgcaacctcctgcatggagcgtagtacaccgtgttcgcccgctgacgaaggcaaacccatagacatgtcgtcagacatagcgaacctcaaattattttattaagtgtaaaacagttaacgactatcgcagcctggaactgcgataacaacccataagcacatggattttccagcagtgaatgctgacgctccaactgcgcaaccggtttctttttcataacattattaagcacataaccgaacgtaagtgtgaaagttcggcgaaaccacgagaaaactcttgtttttacaagagcgcccttgttcagtcctcagtaactgtaaccagctcttgaatcctgagaagcgccgagatgggtataacatcggcaggtatgcaaagcagagatgcagagtgcggggaacgaatcttcaccagaacggtgagacaggttaagcagcagacaacggttcattatttcgtatcacctccacggccgcctgttaagacgaacccacaagccaaaactctgatttcaacccggctggaagtggcaacacgaaagaaacgtcgtgtgctttttatttaagccgcgcgccgcgttttataccccacaatggcagaaaattgcaaaagataaatacgcagaatgccggcattgtcaggaaaaatttccagccacgtttttaacagaatgagacacgattcaaaaaaaagtggaaatagggtgaagaattgacctaaaatagccatccagatgttaatccatccataccgattaacactcagactgccagtgtttttaacctgcagagtcgtggtaggatccgctaccacagaaaatccacacaacagtttgagctaaccaaattctctttaggtgatattaaatatggcaaaacacctttttacgtccgagtccgtctctgaagggcatcctgacaaaattgctgaccaaatttctgatgccgttttagacgcgatcctcgaacaggatccgaaagcacgcgttgcttgcgaaacctacgtaaaaaccggcatggttttagttggcggcgaaatcaccaccagcgcctgggtagacatcgaagagatcacccgtaacaccgttcgcgaaattggctatgtgcattccgacatgggctttgacgctaactcctgtgcggttctgagcgctatcggcaaacagtctcctgacatcaaccagggcgttgaccgtgccgatccgctggaacagggcgcgggtgaccagggtctgatgtttggctacgcaactaatgaaaccgacgtgctgatgccagcacctatcacctatgcacaccgtctggtacagcgtcaggctgaagtgcgtaaaaacggcactctgccgtggctgcgcccggacgcgaaaagccaggtgacttttcagtatgacgacggcaaaatcgttggtatcgatgctgtcgtgctttccactcagcactctgaagagatcgaccagaaatcgctgcaagaagcggtaatggaagagatcatcaagccaattctgcccgctgaatggctgacttctgccaccaaattcttcatcaacccgaccggtcgtttcgttatcggtggcccaatgggtgactgcggtctgactggtcgtaaaattatcgttgatacctacggcggcatggcgcgtcacggtggcggtgcattctctggtaaagatccatcaaaagtggaccgttccgcagcctacgcagcacgttatgtcgcgaaaaacatcgttgctgctggcctggccgatcgttgtgaaattcaggtttcctacgcaatcggcgtggctgaaccgacctccatcatggtagaaactttcggtactgagaaagtgccttctgaacaactgaccctgctggtacgtgagttcttcgacctgcgcccatacggtctgattcagatgctggatctgctgcacccgatctacaaagaaaccgcagcatacggtcactttggtcgtgaacatttcccgtgggaaaaaaccgacaaagcgcagctgctgcgcgatgctgccggtctgaagtaatctttcttcacctgcgttcaaaggccagcctcgcgctggcctttttcttttggataggcgttcacgccgcatccggcaaaaaaaccgcccgcacaataacatcattcttcctgatcacgtttcaccgcagattatcatcacaactgaaaccgattacaccaaccacaacagacaaagatttgtaatattttcatattattattcggttttcacagttgttacatttcttttcagtaaagtcttaattgcagataacagcgtttaatctatgatgatataactcaattattttcatgcacttaaatcataactaagataaatgttagtgtaagcgattacactgatgtgatttgcttcacatctttttacgtcgtactcacctatcttaattcacaataaaaaataaccatattggagggcatcatgcctgacgctaaaaaacaggggcggtcaaacaaggcaatgacgtttttcgtctgcttccttgccgctctggcgggattactctttggcctggatatcggtgtaattgctggcgcactgccgtttattgcagatgaattccagattacttcgcacacgcaagaatgggtcgtaagctccatgatgttcggtgcggcagtcggtgcggtgggcagcggctggctctcctttaaactcgggcgcaaaaagagcctgatgatcggcgcaattttgtttgttgccggttcgctgttctctgcggctgcgccaaacgttgaagtactgattctttcccgcgttctactggggctggcggtgggtgtggcctcttataccgcaccgctgtacctctctgaaattgcgccggaaaaaattcgtggcagtatgatctcgatgtatcagttgatgatcactatcgggatcctcggtgcttatctttctgataccgccttcagctacaccggtgcatggcgctggatgctgggtgtgattatcatcccggcaattttgctgctgattggtgtcttcttcctgccagacagcccacgttggtttgccgccaaacgccgttttgttgatgccgaacgcgtgctgctacgcctgcgtgacaccagcgcggaagcgaaacgcgaactggatgaaatccgtgaaagtttgcaggttaaacagagtggctgggcgctgtttaaagagaacagcaacttccgccgcgcggtgttccttggcgtactgttgcaggtaatgcagcaattcaccgggatgaacgtcatcatgtattacgcgccgaaaatcttcgaactggcgggttataccaacactaccgagcaaatgtgggggaccgtgattgtcggcctgaccaacgtacttgccacctttatcgcaatcggccttgttgaccgctggggacgtaaaccaacgctaacgctgggcttcctggtgatggctgctggcatgggcgtactcggtacaatgatgcatatcggtattcactctccgtcggcgcagtatttcgccatcgccatgctgctgatgtttattgtcggttttgccatgagtgccggtccgctgatttgggtactgtgctccgaaattcagccgctgaaaggccgcgattttggcatcacctgctccactgccaccaactggattgccaacatgatcgttggcgcaacgttcctgaccatgctcaacacgctgggtaacgccaacaccttctgggtgtatgcggctctgaacgtactgtttatcctgctgacattgtggctggtaccggaaaccaaacacgtttcgctggaacatattgaacgtaatctgatgaaaggtcgtaaactgcgcgaaataggcgctcacgattaatctccccaagcttcctcccatcgcggaggaagccacctcttgcagtcatcttttcttcgctctatcctctgccgctatgaaaacatcccgtctccctatcgccatccaacaggccgttatgcgtcgcctgcgggaaaaactcgcccaggccaacctgaagctagggcgtaactacccggagccaaaactctcttacacccagcgcggaacctccgccggaacggcctggctggaaagctatgaaattcgcctcaatcccgttttgctgttggaaaacagtgaagcttttattgaagaagtggtaccgcacgaactggcacatttgctggtatggaaacatttcggccgcgtagcgccacatggcaaagagtggaagtggatgatggaaaacgtgctgggtgttcccgcccgtcgtacgcatcagttcgaactgcaatccgtgcgtcgcaacaccttcccctaccgctgcaagtgccaggagcatcagcttaccgtacgccgccataatcgcgtagttcgtggcgaggccgtctatcgctgtgttcactgcggtgaacagctggttgcgaaataaccatctgaactatcaggaactttcctgatctggctgattgcataccaaaacagctttcgctacgttgctggctcgttttaacacggagtaagtgatgtaccgttatttgtctattgctgcggtggtactgagcgcagcattttccggcccggcgttggccgaaggtatcaatagtttttctcaggcgaaagccgcggcggtaaaagtccacgctgacgcgcccggtacgttttattgcggatgtaaaattaactggcagggcaaaaaaggcgttgttgatctgcaatcgtgcggctatcaggtgcgcaaaaatgaaaaccgcgccagccgcgtagagtgggaacatgtcgttcccgcctggcagttcggtcaccagcgccagtgctggcaggacggtggacgtaaaaactgcgctaaagatccggtctatcgcaagatggaaagcgatatgcataacctgcagccgtcagtcggtgaggtgaatggcgatcgcggcaactttatgtacagccagtggaatggcggtgaaggccagtacggtcaatgcgccatgaaggtcgatttcaaagaaaaagctgccgaaccaccagcgcgtgcacgcggtgccattgcgcgcacctacttctatatgcgcgaccaatacaacctgacactctctcgccagcaaacgcagctgttcaacgcatggaacaagatgtatccggttaccgactgggagtgcgagcgcgatgaacgcatcgcgaaggtgcagggcaatcataacccgtatgtgcaacgcgcttgccaggcgcgaaagagctaacctacactagcgggattctttttgttaacccctaccccacgcgtacaaccgcgtggggagacgacgcggatttttaactatgcgtatcccccgcatttatcatcctgaaccactgaccagccattctcacatcgcgctttgcgaagatgccgccaaccatatcgggcgcgtactgcgcatggggccggggcaggcgttgcaattgtttgacggtagcaaccaggtctttgacgccgaaattaccagcgccagcaaaaaaagcgtggaagtgaaggtgctggaaggccagatcgacgatcgcgaatctccgctgcatattcacctcggtcaggtgatgtcgcgtggtgaaaaaatggaatttactatccagaaatcgatcgaactcggtgtaagcctcattacgccacttttttctgagcgctgcggcgttaaactggatagtgaacgtctgaacaagaagcttcagcagtggcagaagattgcaattgctgcctgtgagcagtgtggtcgtaaccgggtgccggaaatccgtccagcgatggatctggaagcctggtgtgcagagcaggatgaaggactgaaactgaatcttcacccgcgcgccagtaacagcatcaatacgttgccgttaccggttgaacgcgtccgcctgctgattggcccggaaggcggtttatcggcagatgaaattgccatgactgcccgctatcaatttactgatatcctgttgggacctcgcgttttgcgtacagagacaactgcgctcaccgccattaccgcgctacaagtacgatttggcgatttgggctaacggagaagaataatgatcaagctcggcatcgtgatggaccccatcgcaaacatcaacatcaagaaagattccagttttgctatgttgctggaagcacagcgtcgtggttacgaacttcactatatggagatgggcgatctgtatctgatcaatggtgaagcccgcgcccatacccgcacgctgaacgtgaagcagaactacgaagagtggttttcgttcgtcggtgaacaggatctgccgctggccgatctcgatgtgatcctgatgcgtaaagacccgccgtttgataccgagtttatctacgcgacctatattctggaacgtgccgaagagaaagggacgctgatcgttaacaagccgcagagcctgcgcgactgtaacgagaaactgtttaccgcctggttctctgacttaacgccagaaacgctggttacgcgcaataaagcgcagctaaaagcgttctgggagaaacacagcgacatcattcttaagccgctggacggtatgggcggcgcgtcgattttccgcgtgaaagaaggcgatccaaacctcggcgtgattgccgaaaccctgactgagcatggcactcgctactgcatggcgcaaaattacctgccagccattaaagatggcgacaaacgcgtgctggtggtggatggcgagccggtaccgtactgcctggcgcgtattccgcaggggggcgaaacccgtggcaatctggctgccggtggtcgcggtgaacctcgtccgctgacggaaagtgactggaaaatcgcccgtcagatcgggccgacgctgaaagaaaaagggctgatttttgttggtctggatatcatcggcgaccgtctgactgaaattaacgtcaccagcccaacctgtattcgtgagattgaagcagagtttccggtgtcgatcaccggaatgttaatggatgccatcgaagcacgtttacagcagcagtaacccaccttagcgagaaggatctcgttgagactctgagtgacagcgcccttctttccacgcatactgggcgctgttgcttttttgaaccaggaaacagaacctctgacaatgaatttacagcatcactttcttattgccatgcctgctctccaggatccgattttccgtcgttccgtggtctacatttgcgaacataataccaatggtgcaatggggatcatcgtcaacaagccgctggaaaatctcaaaattgaagggattctggaaaagctgaagatcacgccggagccgcgtgatgaatcaatccgtctggataaaccggttatgctcggcggtccgctggctgaagatcgcgggtttattttgcatactccgccctccaattttgcttccagcattcgcatttcagacaacacggtaatgaccacttcccgcgatgtgctggaaacgctcggcaccgataaacaaccgtctgacgtattggtggctctgggttatgcctcctgggagaaaggtcaactggaacaagaaattctcgataacgcgtggctaacggccccggcagatctgaatattctgttcaaaacgccgattgccgaccgctggcgcgaggcggcaaaactgattggtgtggatattctcaccatgcctggtgtggcaggacacgcctgatgagtggaaccttactcgccttcgacttcggcaccaaaagcattggcgtagcggtcggccaacgcattaccggcaccgctcgccctttgcctgcaattaaagcacaggacggtacgccggactggaacattatcgagcgtttactgaaagagtggcagccggacgaaatcatcgtcggtttgccgctgaatatggacggcaccgagcaaccattgactgccagagcgcgtaaatttgccaaccgtattcatggccgtttcggtgttgaagtaaagctccatgacgagcgtcttagcactgtggaagcccgttccggtctgtttgaacagggcggctatcgggcgctcaacaaaggcaaagttgactctgcctctgcggttattattctcgaaagctatttcgagcagggatattaaggcgatttaaacgcctggcggagtgtaaataatatcatcgcgtcttattgccggatgcggcgtgaacaccttatccagcacacatctggcagcggctataggtctgataagacgcgttagcgtcgcatcagacatttattgcctttgtaggcccgataagcttgcgcatcgggcatggcaacgtcacaaacgcccttcccccacccggtgctgataactctgctgaaacgttatcatccccacctgctgcccggtttgaataacatgcggtaactggtgggttttcccttcgcgaatcaaattccccaccgcgggtgtgttaatcagcaattcaaatagcgccacgcgtccttcctgtttatccacttccagcttttgtgacagcactgcccgtaaactacctgccagttgattacgcacggggtctttttcctgcgccggaaatgaatccaccagtcgctcaactgcctgcgcggcaccacgcgtatgtaatgttgccagcaccaaatgcccggtttctgccgccgtcagtgccagacggattgtctcgctgtcacgcagctctccgagcaaaatcacatcaggatcttcccgcaatgcggcccgcaatcccgatgcgaacgtcatacagtgcaaaccaatttcccgctgctggatcaaacatcgctggctggcatagagatattcaacaggatcttccagcgtcagaatatgcgcatcggcatgttgattgagatagccaaccatcgccgccagcgtggtagatttgccactccccgtcgcccccgtcaccagaatcaggccattctcgctcttgagtaattccggcaataccgttggtgcgccaagctgttcgagctgcgggcagtgcgaaggtaacagccgtaacgccagcgaaatgccatgccgttgcgcgaatgcgctgccacgcaatcgctggttttccgccagcgacacggcaaaatccagctgaccattctccagcaatattgcccgctgatcgtcatccagccactcccgcagtagctcttcgacgtccggcgtatcaaacggcgcagcttccattctgccgcgaatgcgccatcgtgcgggccaggcgctgcacaggtgtagatccgagacgttatgctttacactaagggccacaatttcttccatattcatactaagatcctcggaaaatgaacgatattgcgcataacctggcacaggtccgggacaaaatctcagcggctgcaacgcgttgcggccgttctccagaagaaattacgctgcttgcagtcagtaaaacaaaacctgcgagcgccatcgcagaagccattgatgccgggcagcgtcaatttggtgaaaactacgttcaggaaggggtagataaaattcgccactttcaggaactgggcgtaacaggattagaatggcattttattggcccgttgcagtctaataaaagccgcctggtggcagagcatttcgactggtgtcataccatcgaccgtttgcgcatcgctacccgtctcaacgaccagcgcccggcagaacttccccctcttaacgttctgattcaaattaacattagtgatgaaaacagtaagtccgggattcaactggctgaactggacgagctggcagctgcggtcgctgaactaccgcgtttacgtctgcgcgggttgatggcaatccctgcgcctgagtcagaatatgtaaggcagtttgaagttgcacgccaaatggctgtagcatttgccggactgaaaacgcgctacccgcatatcgacacgctctctctgggaatgtcggacgatatggaagccgccattgcggcaggtagcacgatggttcgtatcggcactgcaatttttggtgcgcgtgattactctaaaaaataaggaattaaaggaacgccatgaatacgttgactttcctgctttcaacggtcattgagctgtataccatggtgctgttattacgcatctggatgcagtgggctcattgtgatttttacaaccccttctcacagtttgtagtgaaggtaacgcagccaattatcgggccactgcgccgcgttattccggcaatggggccaattgacagcgcctcgctgctggttgcctatattctcagttttatcaaagccatcgtgctgtttaaagtggtgaccttcctgccaatcatctggattgccggtttactgattctgctgaaaaccatcggcctgctgattttctgggtcctgctggtgatggcgattatgagctgggtaagccaggggcgtagcccgattgaatacgtgctgattcagctggccgatccgctgctgcgcccgattcgccgcctgctaccggcaatgggtgggattgatttctcgccgatgatcctcgttctgctgctgtatgtcatcaatatgggtgtcgcagaagtattacaggcaaccggaaatatgctgctgccagggctgtggatggcgttatgaatgccgtaacagttaatgatgacggtctggttttacggctctatattcagccgaaagccagccgtgattctattgtcggtttacatggcgacgaagttaaagtcgccattaccgcgccgccggttgacggccaggccaacagtcatctggtgaagtttctcggtaagcaattccgggttgccaaaagccaggtggtgattgaaaaaggcgaacttggccgccacaaacaaattaaaatcattaatccgcaacaaatcccgccagaaatcgcggcgttaattaattaggtatcctatgcaaaaagttgtcctcgcaaccggcaatgtcggtaaagtgcgtgagctggcgtcgctgcttagcgacttcggtcttgatatcgtggcccaaacagacctcggcgttgattccgctgaagaaaccggcctgacctttatcgaaaacgcgattctgaaagcgcgccatgcggcaaaagtgaccgctttaccggcaattgccgacgactctggtctggcggtagatgtgcttggcggcgcgccgggcatttactccgcgcgttattccggtgaagacgcgaccgatcaaaagaatctgcaaaaactgctggaaacaatgaaagacgtaccggacgaccaacgtcaggcgcgtttccactgcgtgctggtatatctgcgtcacgcggaagatcccactccgctggtatgccacggtagctggccgggcgtgattactcgtgaaccagcgggcactggtggctttggttatgatccaatcttcttcgtaccttccgaagggaaaaccgccgccgaactgacccgcgaagaaaagagcgccatttcccaccgtggtcaggcgttgaaactgctgctggacgctttacgtaatggttaaattacctccgctgagtctctacattcacatcccgtggtgcgtgcagaaatgcccgtactgcgatttcaactctcacgcgttgaaaggagaagtgccgcacgacgattatgttcagcatctgcttaacgatctggacaacgatgtggcttacgctcagggccgtgaagtaaagacaatctttattggcggtggtacgccgagcctgctttccggcccggcgatgcaaacgctgctggacggcgtgcgtgcgcgtttgccgctggcagcggatgcagaaattactatggaagcgaaccctggcacggtagaagccgatcgctttgtcgattatcagcgtgctggtgtgaaccgcatctctattggtgtgcagagttttagcgaagaaaagctgaaacgacttgggcgtattcatggcccgcaagaagcgaaacgcgcggcgaagctggcgagcggtttagggttacgtagctttaaccttgatttgatgcatgggctgccggatcaatcactggaagaggcgcttggcgatctacgccaggccattgaactgaatccgccgcatctttcctggtatcaactgaccatcgaacccaatacgctgtttggttcgcgaccaccggtgctgccggacgatgacgcgttgtgggatatattcgaacaggggcatcagttattaaccgcagcgggttatcagcaatatgaaacttccgcttacgccaaacccggttatcagtgccagcacaatctcaactactggcgctttggtgactacatcggtattggctgcggcgcacacggcaaagtgaccttcccggatgggcgcattctgcgtaccaccaaaacgcgtcatccgcgtggttttatgcaaggaaggtatctggaaagccagcgtgatgtcgaagccacagataagccgtttgagttctttatgaatcgcttccgtctgctggaggccgcgccgcgcgtggagtttattgcgtataccgggctttgcgaagatgtgattcgcccacagttagacgaggcgattgcccagggttatctcaccgaatgtgcggattactggcagataacggaacatgggaagctgtttttaaattcgctgctggagctttttctggctgagtaaacttgtattgccggatgcggcgtgaacgccttatccagccgacatgtggcagcggttgtaggtctgataagacgcgcaagcgtcgcatcagacgttgattgccggatgcggggtcaacgccgcatcctgctacaaatcgtgcactatatcaaacttacttaatcaccccattgcgccgcagttgttcggtatcttttttccagcgttcattagcttggttgatatcgtcaattttcatcaaaatcgcgacttttttactgtttatttctgaaactttcatcgttaacggatattgccctttttcgagcgttacccagtcatcctgcaatttacggctaagtttttgtgattgcagaaaagtctgtcgccgttgttcgttgatatcgaaatctcgtttctgctgaatcggcacttcataacactcttcactctgtttatgacatgccgcaatcgccggttgataaacctctttgtcatatttaaccgcgaacgcctcg
